United States Patent Application Publication US 2026/0191916 A1 - sequence listing, part 41

SEQ ID NO: 154 - DNA, 4937525 bp, Bacteroides uniformis (residues 3,291,685-4,937,525 of 4,937,525)
  source 1..4937525: mol_type = genomic DNA
ttgctgtttgccacctctttggcaggaatcgggaacacatggtttacattcggattgaatgtacgtgcaggccagatttcaacctcctgcacattaaatgagccgtcagggttagtagtggtcttcaccccatgcaacggcttggcataagcttcctgtgcatcgtgccatctcacgaggtcaaggtggcggctgggttggaactcaaatgcaagttcacaacggcgttcgttcttcaattgcaccttggtggcttggctgttttcaggcaatccggcacgcttgcgaatctgattcagcagagacttggcctcggaatcaccttcgccgttcttccagataagggcttctgccttcatcagcagaatgtcggcataacggataaggcaagtgcccagcacgttgctggcattgttcatattggagttcactttttttcctatacagtcggcgttttcccaaggagacatgaattttctccaggtcaagcctgacgtgcttgatgtagcccatgagcctaccgcccatgtaacatcctgccccacaaactggatatggtcgcccggataaaggatagtagcgtcacggcgctcgtcacctgcttcgtaagcgttgtaaagctcaagcgtaggctggaagtacccccacgtattatacaatccccagccaccgttctcaaacgacatgccatggaatttaggaccttccactgcattacccagcaacgagaagatgtattcttcgcagaagttgttctcttcgcgccacagacgggcaaagtcgggatagaggccacgtttatccgcgcctgtcatacccatcaccttgtcacacatctcgataaccgtgtcgtaatacttagcatcgaactgcgaagcgtaaagtgccgcacgagctgcaaatgcccagcatgcagccttgtgaggacgaccatagtcttcgttggccatttcggacaaatagggaagcaaatcggcggcagcgcgcatgtcttctataatcatgtcatagttggcaagcaccgaagtcggacgcggttggtctatttcggcagtcggcgttttttccgttacgataggaataccgccgttcacaccgttatcgccataccaaggagccagccacaaatagctgaaaccgcggtagaagcgtgcctgaccgatggcgcggttctttacactcccggagatggacatgtcgggcacattgcgcaacacatcgttggcacgggcaatgatgcggtacatccacggccaattgtctttttggtcgcgaccgttttccggggtcatttggaaatccttaatggcctgtgcctcactctgtgaacgaccggtcaccatgttgtcactacaattctcaaaccacatgaatccgcggcccgtcactccttcttggtaggtgaattcatggaaagcattcaacgccttttccacatcttcttccgttttccagaaattggtactgccctccagtccataagggtcaaattccaggaaatcactgcaggcggccaatgaaaagcccagcaagagcgacaatgctatagttttatattttttcatttcaatctactgttttttagagtttggttttcatttagaagctaaagttaaatccgatactgaaagagcgtgccacgggatatgtacctccgtcgataccaaagtttcctacttcggggtcgataccactataatcggtagccgtaaagaggttttcgccgttcaggtagaaacgagccgtgctgcccggcagaccgatggctctcatcacattgtcgggcaatgtgtagccgatggtaacgttcttcaggcggaggtagctggcatcttccaagaagaagtcgttcaagctgttgtagtttccattaggatcggaaatcaaaccgattctgggcacgcccgaagtcttgttatattcccaggagttctttacgtcggcaagcatattgccaccctgtccgcgaccggtgtaacccatctgcttgaagccgttgtaaacggtggatttccccacaccttggaactggaagctgaagtcgatgcctttccactgcaagttaccgccaaagccgaaagtaatcttaggcatatagctgcccaaatattgcttgtcatcatcggtaatcttgccatcgttgttgaagtccacatacttgaagtcaccgggcttggcattgggctgcactttttgcttgatgcccgtttcggggtctctccaagtaaagttgtctatctcttcctgactctggaagataccttcggtcttcagcacgtaataagaataccaaggatggcccacggcggaacgcaacggggtaagactgttgattaccacattgtgttgcatgaattcaaggttaccaaggtcgagcacttcattgtgaacagtagaaaggttaccgtttacaccaaatgtcacgtgtcctatcttcttgctgtagctcaagccgaattcccaaccacggttcaccacatcgcccacgttgccgtaaggagagacagagatacctgccaccgaaggaacaggcaccacctcgataaggtctttcgtgcgcttattaaagtagtccacagtaagattcaggctgttgtccagcaagcccatgtccaaacctactccccactgctcggtggtctcccacttcaagtctttcgtaccgatagaaccggcatatacaccaccatatacaatgttgttcaaatctttaccataaatcatcgcccaatcggtttcattcagaggcacattccaagaatagcgcggaaccaatgccacgttacctacctgtccccagcttccgcggactttcagcagattcaccacattcttcaaaggttcaaagaattcttcggaagaaatcttccaagaagccgagaatgcagggaacacgccggagttgttatccttatagagtttggaagtggcatcgcggcgcacgctagcagtaaggaagtagcggtcttcgtaagagtagcccagacgagcgaataccgacaacatactttcctcccaaatgttttcctccggctgaaatttgctccattcgcctgcctggccgttggtaatggagtgacgatcctcattgacgtagccggtagtgtagtaagcgtcatatttatacttttcgtagctcatggagtaacccgccatgagactgaagtgatgcttgtcggcaaacaccttggcataagtggctgtagtttcccacaaaagcttgctgttccaagtattggtcttatcgcgagagttatcagaatttgggcgaccgatttcgggaacacggcaattgaatatgtcttccgtacgaatgtcgattccggcagtaaagtcactcttcaccgtaagacccgaaacaggcttcaactcaaacgaagtagtagagtagatgcggttggaaggtcgtatctggtcgaggcgttccaacatggcaacagggttgcgcatctcaccgtaaggactattgatgccctctgcagatgcccaacgggggatagtgccatggtaaagcggtttgcctgttttttcatcaatcatcaattttccctctttgtcgtagtcatatatacttgccgagcgggggaagaagacagcctgattgagcacaccttcgtgaccggtacctacatcgccctgtccgtttttatattcgtagctgacacgctcgctcacctttagccattttaccacctggaagtccagattggccttggcagagaacttgcgggcataggtattgaggagcacccccttgtcgtcatcataagcaaacgaagcgaaacccttcatcgtatcgctaccccccgacagagagagggcatagtgttccagcgagccggtgcggaagatggcatccatccaatcggtacgggtaacgttgccataagggaaaatctccgggtttctggaagcgtggagagggtcaccggtagccgtacaagcatcagcccagattctgttatactcttcggcagtcagcgtctccggcaggttcacagcgttcttaaagctcttggaaatgttgatgttcaccttcaccttgcctgcggaagcctgcttggtggttaccacaaccacaccgcccgaacctacgctagcaccatagatggcagcagaagcagcgtctttcagcacagtgatactttccacatcttccatgttgaaaggggctcccggcacgccgtcgaccacatagagcacaccatcaccgctgttataactgtcgtccgtaccacgcgaaccacgcccacggatagacagagagacatcggacatcgggtctccaccattggactgtatcatgactcccggcatttgtccttgcaaataagaacctaaatttgcaggacggcttttcaacttatcatccattttcactgtagaaaccgcggtggacaagtcttccttacgactcgttccatagccaatgaccaccacttcgtcaagcaattccgcatcttcctgcaaaattatggtaataggcttcgacgatgcctttacttcttgcgttttataccccagaaagctgatttccaaaacatctttttctgtggtttgtaatgcgaactttccgtccacatccgtaattaccccattcgtcgtccccttgacaaggacattggcaccaatcactggttcgccattctgatcctttactgttcctttcacagaaatctgctgtgcataagcacctgccgacaagaacagccccaacaatagggtcagaatcgttcgatagattctaagatttacttgtttcatgcattcaaaatttaaagtttataatataaaaattataattctgccacaaaggtcagaaagcagaattacatagttattacaaaaggagtatttctctaacagcccttatttattcgtgaaacaatataacaataaaacgtttattattttttcaattaaatcgtatagggattattactcaagaagagcggcagcacccaatagactggaatcctttttatgcgaagccactaccctcacattatccgatatgattttgtaggggaaactttgcattgtttgttccatagcatctttaaagaaaggaaaagccgatacgataccgcctcctaaaacaatagcttggggagcataggcaaaaagaattgcctttataagattgcccaaatgcctcccaaactctttccaaatctccaatgcagtttgttctccttgctgggctttttcagctactaccgcaccggtagttccataacgtttaaacaagaaactactgcaatagtgttcaaaatcagagtccaaataaggaaatgagcctatctcaccggctcccatatattgcccaccatacaaatggcggtcaatgacaacaccagctccaattccggtcccaatagtaacgcctaccatattggtgtaagattttccttcgccgtataggctctcccctaaagtgaaacagttggaatcattattaatggcaactgccaccttgaattcgttctccaaaatctccttcaagtgtatttctttccaagaagatatatttgctacattatatacaattcctttctccggatcaacaattgaagggacaccgataccgataccatctacctgctcattcatcatattccgaataagctgggaaagctggtttaacacagtagaagcatcttgctgagctaaacatggaaccgacactttattcaagcagttccctttttccacttgggctattcgaatattggttcctcctaaatctattgacagtttcatagtatataacattaaggtgttcaacatgtgcaaaattaaaaaaatgcttttttttcagtattcccaattgcgcatataaatcttcattttgcgcaaacattactgtcaatcaaatattccaccaaatcttttcctccaggttcacagacaaaatcgataaaaacaataccacaattccggctattcttttgttttaaatagtcagcaatagacttgttcaccttatcagcaaagactttaggggttcccaagggcagccccgtcgcacttacaaaagtaatcccccaccgacgtgaagaaaccggctcaacagatatcccttcaatattatgaatacaaaccccgaccttcttcccggcctcctcacccgattcatattgatactcatcttcgagcagagctatcccttccttaccatctttattgcgaagagtgagcaggcaagtgctgtcatcctcccaacctacacatgctgctccaggataattatccatagcataatccctatgcaggaaaagaatctttccacggcaatctttcagcgtcagttcagggcgaaagtccatcacgaaataactttgatacttagggttgcttaaagaagcagacagcagagaagcataatcccgcgattctcccccttcctttttcaaagaaacaatcaaagtctcagaaggatatgtttgcaaaaagtgtataaaagcaggtaaaacatcatcttcccaatatatatcctgaaaggcatggctgtgaaatacccccagtttatcatccttcttttccaaacggatatcaaaagcgcggatgccttgttgcaattgggcaggaatatctgttgcttgcgttttcaacatatgccctcctttgatactaccactatcgtgtgaaccgggaatagaaatcttacatataggaagtgtatcatggagaatcctcatccactcaggccgcaatgcagcctcatcccccgcctccgcacaagtatcctgcaatctgggagctgtagcacaaaccggagcattcaatagaaatatggtcaaagctaatacaacaactgttctaaatccgtttctcttcatagtatattgcttttaagtttactgcatgcaaatgtagagggttcattcttttccctcatcctaaattgcgtatttagttcttcattttgcgcaaacatcaaaagcaacatatagtaacatccgagccaaacgtaatgtaccttttcattacatagatgtacctaacaaaaaatgccatacattctccgtactgcgtatctcatcccagacgaagccctcccaagaaaaggatttcaactcctcaggacactccagacggttcttgacaataaaacgcgtcatctctccgcgacacatcttggcatagataacgacagtcttcggctgtccggccttccaaacttgaaactcgggcgtaataacacgcacctcttgctccacccgcttccagtcgaacaaatctttcatttcagcacttgccaaattaatgagaacaccgccacagtttttaatttcctctatgaagtaatccgtcaacaaaggcttccaataatcaaacatggatattccacctttttcgggcaaacggacatctccttccaagcgatagggtttgataccgtccagcgggcgaagcaacccataaagaaaagaagtgatacgcagatgttcttgcgcataacgaaaatcctccgccgaaaaatccttcggaagaatacgtttaaaaacagctccggtataggcgcagatggccggcatcggacaattctcttccgaacagaaatcatgaaaacgcaaacggttctcggcagcaattttggtattcacccgaagaagcctttccaattcggataccgaatactgagacatttccaacgcattccgcacagcctccacctcaaatttcgggactgtgacttcgggcacgacaacagagttgtgcgctgccatggtctttgcacaagaaataaaaacaagcatagcgatatttttttatagatacaaaaataaagatttttagtggagaatgcatatagttataaagattttccacagaatccacctccgtttcaagagtttttcatacctttacaccttgttagagaaaagtgcacgtattagcccccactccccaacatctcgagatagaaaaagaaaaaataatatataaaatgacttacaaatggaattatcaacccattacacccgaacaggcagaagcaagccaacaactggcccaagaattgggaattagctcaatattgggaaaattgctggtggagcggggaataacaacggcagcggatgcccgaaagtttttccgcccccaattaccggacttatacgacccattcctgatgaaggatatggatatagccgtagagcgcctgaacaaggcaatgggaaagaaagagcgcattcttgtttatggagattatgacgtagacggtaccacggctgtggcattggtctataagtttattcaacagttctattcgaacattgattactatatccccgaccgttacaatgaggggtatggagtttcaatccaaggagtagactatgccgcagaaagtggtgtaggcttaattattgtattggactgcggtatcaaagccgtcgaagaaatcacatacgccaaggagaaaggcattgatttcatcatctgcgaccatcatgtccccgatgatgtactcccccctgctgtagctattctgaatgccaaacgggaagacaatacctatccttatgagcatctgtccggatgcggtgtaggctttaagtttatgcaggcatttgccatcaacaatggtatcgagttccatcacctaattcccctattggacctttgcgccgtcagcatcgcatcagatattgtacccatcatgggtgaaaaccgtatccttgcctaccatggcctaaagcaattgaacagcaatcccagtgtaggtctgaaagccatcattgatgtctgcggactaacggacaaggatatcactgtcagtgacattgtattcaaaataggtcctcgtatcaatgcctccggacgtattcagaacggaaaagaagccgttgacctgcttactgaaaaagatttctctcttgccctggagaaagccggacaaatcaatcaatacaatgagacccgcaaggacttggacaagaccatgaccgaagaagccaataagattgtggccgatttggacggacttgccgatcgccgttctatagtattgtacaatgaagactggcataaaggtgtcatcggaatcgttgcctcccggctgactgaaatctattaccgcccggcagtagtgctgacgcgcacggatgacatggcaaccggctctgcccgttccgtctccggattcgacgtctacaaagccattgaatactgccgcgaccttctggaaaacttcggagggcatacctatgccgccggcctttccatgaaggtggaaaatgtaccagcttttatcgaacgtttcgaagagttcgtatcacaaaatatcctgccggaacagacatgcgccgtcatcgacatcaatgccgagattgatttcagagacatcactccgaaattcttcagcgacctgaagaagttcaatccattcggaccggacaatgccaaacctattttctgcacgcacaatgtctatgattatggtaccagcaaagtcgtaggtcgcgaccaagaacatatcaagctggaattagtggataataaatcgaacaatgtgatgaacggcatcgctttcgggcaaagttcccacgtacgcttcatcaagaccaaacgttccttcgacatctgctattctattgaagagaatactcataagaggggtgaagtgcagttgcagattgaagacataaagccgaattaaaagtcatgaggatgtatcaaaagtatataagcattttctttatgttataatttcaggcgcggattacgcggattccacggatttattttactgaatccgcattattcctcgtaatccgcttctaaagaaagcattaagagtattttgaaacacctacgataggaatggcaagaagtttaataagaccatgaacagcaatagtaacttcaaaactcccctccctacgggattgctctcccctgatagcggaggagctggagaaggtggattgggggggaagcttctgaaacaatactggggctatgacgccttccgaggaatccaggaagacatcatcaacagcattaccgagggacgggacactttgggactaatgcccacgggaggaggaaaatccatcactttccaagttccggcacttgccaaagaaggactttgcctggtcattactccgttgattgccctcatgaaagatcaggtacaaaacctgaaaaaacgaggaatcaaagcgcttgccatctactcaggcatgagcaggcaggaaatcatcgtcacattagagaactgcatctttggcaatttcaagtttctctatatctcccccgaaaggctcgataccgaaatcttccgcaccaaactgcagaagatgaaaatcagtatgattacagtagacgaaagccactgcatatcacaatggggttacgatttccgtcctgcctatctgaagatagccgaaatacgcaaactgctgcccggcatccccatcctggcattgacagccaccgccactccggaagtagtgaaagatatccaggccagtttgcatttccgtgaggaaaatgtgttccgcatgagtttcgaacgcaaaaaccttgcctatatcgtccgcaagacggaaaacaagacgggagagctgttgcacatcctgcgccgtatgcccggaagcgccatcatctatgtgcgcaaccgccgccgcaccaaggaaattaccgaactgctgcacaacgaagacatcaccgcagatttctaccatgccggactggataacgccaccaaagacatccgccaacaacgctggcaaacaggagaaagccgtgtcatggtcgccaccaatgcattcggtatgggtatcgacaaaccggatgtacggattgtcatccacatggatctgcccgattccatagaagcctacttccaggaagcaggacgtgccggaagggacggacaaaaagcctacgcggtcatcctttacgccaagtcggataaggcaacactgcacaaacgcattcccgacacctttcctgaaaaagagtatataaaggaagtatatgagcatcttcaatactattaccagatggcaatgggagatggacaaggctgtgtacgcgagttcaatatagaagacttttgccgaaagttcaagtacttccccgttcccgtggacagtgccttgaagattctgacacaagcgggatacctggaatatacagatgaacaagacaatgcatcccggctactgttcactatccgccgagatgaactttataaactgagagagctcggcgaagatatggacaaactcatccaaaccattctccgctcctataccggggtcttcacagaccatgctttcatcaatgaagattcactggccatatgcaccggactcacacgccggcaagtgtatgaacagctcatccacctagccaagctacatatcgtcagttacatcccccgcaaaaagacaccatatataatatacacgcgagagagggttgaaatgcgccacctgcaaatccctcccaccgtgtacgaggaacgcaaagagcgatatgagaaacgcataagtgccatgctggattacgtgagcagcgataccgtgtgccgtagccggatgctgctacactacttcggagaaaagaacgagcataactgcgggcagtgcgacacttgcatcaatttgaagaacaagaaaccttccggccacctttcggaaaaggaattttctgaaaagattcttcaagccctatctgataaacaacaaactccagccactttggcagaacagataccggacgataaaaacatgctcatcgatgtgttacatgaattgttggacgaaggcaaggtaattgctgtcaacggaatgcttcaaatcaaaaaataattcattacttttgccgttggaaaagaatgtcctgccgctgacgaggaacatctcttatcagccatgcttttcctttttattttttaattctttaatttttaatcacctatgggattctttaaatcttttttctccggcaagtcagacagtccgacaaatgagaaacaaaaaaacgagcagaagaattttgagatattcaagtatgacggtatgcgtgcacaacgcatgggccgtacagactacgccatcaaatgcttcattgaagcccttgccattcaggaagactttgaaaccatgggctaccttgcccaagtctacacccagaccaacgaactggacgaggcacacaaactactggaacgcatgaccgaaatagagccggaacatacctccacctacctcagtcttgccaacgtatgctacatgcaggaagactatcctgccatggcaggagcggcaaagaaagctatcgaaatagaagagggcaacgccatggcacactacctgctaggcaaagcagacaatgggcaaggggacggcatcatgtgcatcgctcatcttacgaaagccatcgtactgaaagatgatttcatcgaagcacgtctgcttcgtgccgaagcactggtccaaatgcagcaatacaaggaagcgatggaagacatagacaccattctggcacaagacccggaagacgaaagtgccatcttgctccgcggaaagatagaagaagctacgggaaacaaagaaaaagcagaaagcagttatcagaaagtgacagagttgaatcccttcaacgaacaagccttcctctacttaggacagctttacatcacccaaaacaagctggcagaagccatcgagctctttacggaagccacagaactgaaccctaatttcgcagaggcctatcatgagcgcggacgcgccaagttgctgaacggcgacaaggaaggttctgcagaagacatgaagaaaggactggaactcaatcctaaagagatacagaactttaacggacaatatggtaaccaaccggggggaagtaccggtaatatcctgggattataacaaattcaattattgccgccaatgaaacgaaatttatttctatcagtactttttgtactgatgttcgcacctgcccatgcacagcaagtgaacatattgtcctataacgtacataattgcatcggtatggacaaggagtacaattaccgacgcattgccaatgttatcagtcaaacttctccggacatagtcgccctgcaggaacttgacagtgtaacggtgcgcaacaaaggaatccatgctctcggagaactagaaaaactgaccggaatgcacgggacttatgcagcagccattccttttcagggtggaagctacggcatcggaatcctctccagagagatacccataaaatacaaaatcattccaatgcccggacgggaagaaaaacgcaccctcattattgcagaatttaaagattatgtattttgtgccacacaccagtccctcactccagaagaccagctccttgccgtaccattgatagaaaaagccttgcaaaacgtcgataagcccatctttatggcaggcgacatgaactctgcaccagcaagcgctccccagctggaattggcaaaacattttgccaccctcaatgacacaacctcttatactttcccggcagaccgtcccaaccgatgtatagactacatctacggctattccaagaatgggtatcggtttgacgtacaataccggaaagtcatagaagacaccatttcatccgaccatcgtccggttcaagtcattgtacaaattaaagggaaataagttaaattgctactatccctaaaaaaaacattgttttttgtttgtatataaaagaaaagcattacttttgtcgcgtaattcaaaaacagagaatacaagtatgaagtcatttacttatgcatattacttctttttttacttttactttagccaaaaagtagagcgggagtttgtatgtatcaagtgacagtgatgcttaaggactgaatagagaaacaagtaaatatacagaatcccgctccatcgtatggaagcgggattttttttatagcataaccaagaaaataaagaataatgagaaaggtagccattcaaggaacattaggctcgtatcacgacatcgccgcacacaagtacttcgaaggagaagaaatagagttaatctgttgcgccaactttgaagacgtgttcagtgccatcaaaaaagacagtcagaccataggaatgctggcaatagaaaacaccattgcaggtagtttgctacataacaatgagctattacgccaaagtggtgcacagattgttggcgaatacaagctgcgcatttcccatagttttgtctgcctgcccgatgaagactgggctgatattaccgaagtcaactcccaccctatcgccctgatgcaatgccgtgaattcctcggacagcaccccagtataaaagtggtggaaggcgaagataccgcccgcagtgccgaaatcatccaaaaagaaaacctgaaaggccatgctgccatctgctccaaagcagccgcagagcgttatggcatgaagattctgcaggaaggcatcgaaacaaacaagcacaacttcacccgcttccttgtggtagccgacccttggcaggtggatgaactgaaccggcaccgcagcaaggatgtcaacaaggccagcatggtgttcacactgccccacaccgaaggaagcctttctcaagtattgtccatcttgtccttctacagaatcaatctgaccaaaatacagtccctccccatcatcggacgggaatgggagtatcagttttacgtagatgtcgtgttcgacaatgtactgagatacaaacaatctatcgcagcaatcacaccgctgaccaaagaactaaaaatattaggagaatatgaagatggaaaatcaaacatctaagataaagccagccgaacgtctggcaagcgtaagcgaatactacttctcgaagaaactgaaagaagtggcgcaaatgaacgccgaaggcaaggatgtcatcagtctgggcatcggaagccctgatatgccaccctctgaaaagaccatccaaacgctgtgcgaagccgcctgcaacccagatggacacggctacatgccctacgtgggcatccccgaactgcgccaagcctttgcccggtggtacgagaagtggtacggcgtagcattgaatcccaacacagagatacaaccgcttatcggttccaaagaaggcatcctgcacgtgacgcttgcctttgtcaaccccggcgaacaagtgctggtgcccaatccggggtatcccacctacacctcattgagcaagattctcggtgccgaagtggtgaactacaacctaaaagaagaaaacggctggatgcccgacttcgacgagctggaacaaatggacatgagccgcgtgaagctgatgtggaccaactatcccaacatgcccaccggagccaacgccacccccgaactataccggaagttggtagactttgcccgccgcaaggacatcgtcatcgtgaacgacaacccctacagcttcatcctgaacgaacaccccatcagtatcctcagcatccccggcgccaaggagtgttgcatagagttcaactccatgagcaagagccacaacatgccgggctggcgtatcggcatgcttgcctctaatgccgacttcgtgcaatggatactgaaagtgaaaagcaacatcgacagcggcatgttccgcgccatgcaactcgccgccgccactgcactggaagccgaacacgactggtatgacggcaacaacgccaactaccgcaaccgccgcaggctggcaggcgaaatcatgcacaccctgggatgcacatacgatgaaaaccaggtaggcatgttcctctggggcaaaatacccgacacctgtgccgatgtggaggagctgacggaacgcgtgctgcacaaggcgcgtgtattcatcaccccgggatttatcttcggcagcaacggcaagagatacatccgcatctccctctgctgcaaggaccagaagctggcagaagcattgagccgcatcaaggagataatgaattagcacataggatatagtatattaagaatcatacccttatgcttacctgtattttcaaaggcaggtaaatgcattttccatatagggtaacgatagttcccatataggaaaacggacagtgaaaaagagacattcatacaacgaactttaaaaaactaataaacaaaaaatatggaactcgaattagaacccatcacccttcccggcattgaggacaaacgccccctcatcattgccggcccttgtagcgcagagacagaagaacaagtaatgagcactgccaaacaactggcagacaaaggcatcaaactattccgtgccggcatctggaaaccgcgtaccaaaccgggcggtttcgaaggcgtcggtgtagacggccttgcctggctgaaagaggtaaagaaggaaaccggcatgtacgtttccaccgaagtagccaccgccaaacatgtatacgaatgcctaaaggctggagttgaccttctttgggtaggtgcacgtaccaccgccaaccctttcgccgtacaagaaattgctgatgcactgaaaggcgtcgatatcccggtactggtaaagaatccggtaaatcccgacttggagctctggattggagctctggaacgcatcaacaatgcaggcctgaaacgcctaggtgccatccaccgcggattcagcagctatgacaagaagctctaccgtaacttgccccaatggcatatccccattgagttgcgccgacgcatcccgaacctgcccatcatctgcgaccccagccatataggtggaaagcgcgaactggtagctccactctgccagcaagctatggatttgggcttcaacggactgattatcgaaagtcactgcaacccggattgtgcctggagcgatgcagcacaacaagtaactccggatgtgctagattacatcctcaacctgctcgtcatccgcaaggaaacgcaaagcactgaaaacctcagtgaattacgtaagcagattgacgaatgtgataacaatctcattcaagagctggccaagcgaatgcgtgtggcacgagaaatcggcacttacaaaaaggaacatgatatgaccattctacaaaccggacgctacaacgaaatccttgagaaacgcggctcgcaaggtgcattgtgcggtatggatgccgagttcatcaaaaaggtatttgaggcgatacacgaagagagtgtgaggcaacaaatggaaattataaataagtaattatttaatgtactaatgtgccaatgtgctaattggctgcgcagtaatgccgcatggcaattagcacatcagcacattaacacattagcacattaaacatcatgagaatattaatacttggagccgggaaaatgggctctttctttacagatatattgagtttccagcacgagacggctgtgttcgacgttaacccgcaccaactgcgttttgtctacaacacctaccgtttcactacattggaagaaatcaaggaattcgaaccagaactagtcatcaatgcagctacggtgaaatacacactggacgccttccgccaagtgctgccagtactgcctaaggactgcatcatcagtgacattgcttcggtaaagaccggattgaagaaattttacgaagaaagcggtttccgatatgtatcgacacaccccatgttcggcccgacttttgccagtcttagtaatctgaatacagagaatgccatcatcatcagcgaaggtgaccacttgggaaaaattttctttaaagacctttaccagacaatgaagctaaatatctttgaatatacattcgacgaacatgatgagactgtagcctattcgctgtccatcccttttgtttctaccttcgtattttcggcagtcatgaaacaccaggaagctccgggcactacattcaaaaagcacatggctatcgccaaaggattgctgagtgaagacgattacctgctccaagaaattctcttcaacccgcgcactccctcacaagtggagaacatccgtctggaactgaagaatctgctggaaatcatcaacaacaaggatgcggaaggcatgaagaagtatctgaccaaaatcagagaaaagattaaatagataaaatgtccattgtgaaaacatcaggttccctcgtcctcaacgagggattttttttatctttgcactgttaatagaaccgctttcatgatagaccaacccactatagacagaattcttgatgccgcacaaatatacgatgtcgtatcggacttcgttaccctgcgcaaacgcggtgtgaattatgtaggactgtgtcccttccacgatgacaaaaccccttccttctatgtatcccccgccaaagggctctgcaagtgctttgcctgcggaaaaggaggaaatgtagtgcatttcatcatggaacacgaacagatgtcttatcctgaggcactgaaatatcttgctaagaaatacggcattgaaatcaaagaacgcgaactatccagtgaggagaagatagcacagagcgaacgggaaagcctcttcatcgtaaacaactttgcccgcgactacttccagaacatcctaaagaaccacatagacggacggagtatcggtatggcctatttccgcagccgcggcttccgcgatgacatcatcgagaagttccagttaggttactgtaccgagagccacgatgcactcgctcaagaagccctaaagaaaggatacaaaaaagactatctcgtcaagaccggcctctgctacgaaacagacgaccaccgactgcgtgaccgcttctgggggcgggtcatctttccggtacacactctctccggcaaggtggtagctttcggaggacgtgtgcttgccggtgccaccaaaggcgtcaaggtaaagtacgtcaactcgcctgaatcggaaatttatcataaaagcaacgagctgtacggcatatactttgccaaacaagccattatgaaacaagatcgttgctttctggtcgaaggttatacagacgtcatttccatgcaccaatcgggcatagagaatgtggttgcttcttcgggtacagcattgacacccggacaaatccggatgattcatcgcttcaccaacaatatgacagtactttacgacggtgatgctgccggtataaaggcctctatccgaggtattgacatgttgctagaagaaggcatgaacgtcaaagtttgcctcctgcccgacggggacgacccggactcctttgctcgcaaacacaatgcgacggaattccagaatttcatacaagagaatgaaacggactttatccgctttaaaaccaatctgttgcttgaagatgcaggaaaagaccccatcaagcgcgccgagcttataggaaaccttgtgcagagcatttccatcattcccgaagccattgtgcgcgatgtctatatcaaggagtgcgcccaattactgcacgtagaagacaaactgctggtttctgaggttgccaaacgtcgcgaaaagcaagccgagcaacaagctgagcgagcagaacgtgagcgtcggtcggccaatgcctcaagagccaatgcagaagcaggcatcaatggcagtcaaacagccacagttgccccccccgacgcacagcaagttatcggctacacgcccgaatcactgcctgccagtctcccttccgaaacacctccaccttttctaccccaggaagaatatgtatccttcatcccgcaggaaggcaaggaaggccaggagttctataaatacgaacggcttattctgaagatggtagtgctctatggcgagcgggtgatgtgcaatgtcaccaatgaagaggggcaggaaactcctatcactgtaactgaatatatagtcaatgatttaaaagaagacgagcttgccttccataatccgcttcaccggcaaatcctgacagaggctgccgaacgtatccacaatgagggctttactgccgaacggtattttgtggcgcatcccgaccccgtcatcagcaagctgagcgtggagcttatcagcaaccgctatcagttaaggaaatcacagatagaacaaatggtgacggacgaagaacgcctttatgagctaataccacggttaatgattaacttcaaatatgccatcgtctgcgaagaattgaagcatactctatttgcattacaaaaccctaccatagccaacgatgaaactcaatgcaacagtatcatggagcgctacaacgaattgaacaaagtaaaaagcatcatggcaaagcgactgggagacagagtcatcctgaatttttaaattcaattcggagagttttccatcaagaattatgcctgattaaattcataaattcctcgcgggtcttcgcttggttgaatgctccggtaaaatcggatgtagtggtaatggagttctgtttctctactccgcgcatctgcatgcacatgtgtttagcctccacaacaaccataacccccagcggattcagcgtctcctgaatacattcttttatttggagagtcatacgttcctgcacttgcaggcggtgagagaaaatatccactacgcgggctatcttgctcagtccggtaatatagccgttaggaatatatgccacatgtgcctttccgtagaagggaagcatgtgatgttcgcaaagtgagaagaaatcaatgtctttcacaatcaccatctgactgtattcttcttgaaacttggctgaacgaagtacctcgtgcgggtccatatgataccctttcgtcaacgacaacatggccttcgccacccgttcaggtgtcttctgcaaaccttcacgtccggcatcttcacccagcagagtaaggatgcggtgataatgttccttcagttcatccaatgaaggagatacaatttcttcttttcctaacatgatattctttataaagggatatttatctgctctttcacaatagagacttccttgaatacaccggtagcccgcaactgacgcatcatggcatccgcttcttcgatactgcggaaatctcctgcacggcacaaccagcgaggaggattgaaagaggtataaactgtaagttcggggaaatgttccttgatgcgggtagctaccgcataagcttcgttcttggcctgacgggtattattccctgcataaacctgtatgcggtaacccgaacttttaattactttctgctcatccgaaccggcaggtacatattctgaacctatcaatgccgcaatgcgcgcatcttgatggatagtcaccctgccttgtcctggtacattacgttccaggcttttcacaatattgttctgcgctacagaaatcgttgcaaaaacgaaacatgcaactaaaagtaaaccaagctttttcataattgataattgatagtagataattgataatgaaaaacaaagggaattgataactgacaacgggcacatccccattatcaattatcaatcctccattatccattaattaaaggcatcgatgatacccttgaagtcagaaaccttcaaggcagcaccgccaatcagaccgccgtcaacatccgggttggcaaacaattcctttgcattggagggcttgcagctaccaccataaaggatagagcagttgtcagcgatttccttaccatacttttcagcaatcaatgaacggatgaaagcgtggatttcctgtgcttgttctgcagtagcagtcttaccggtaccgatagcccaaaccggctcgtaagccaagataatcttagagaaatcttcggcagacaaagagaatacagaagccagctgagcagctaccacttcattctgcttgtttgcttcacgttcttccaatacctcaccgatacagaaaatcggagtcagaccgttagccaaagccaattttactttttcttccagaatagcaactgtttcaccatagtaagcacgacgttcagagtgacccagaatgacatattttgcaccagtagaagcaaccatagcagctgatacttcgccggtatatgcgcctgactccttgtctgcacagttttctgcacctacaccaatcttggtagcgtctaccaaaggagtaacagatgccaggtggataaacggagtacagatgattacatcacagttaggcttttcgttagccaatgtttcattcagttcttttgcaagagcaataccctcttggagggttttgttcattttccagtttcctgcaacaatgttttttctcattttttttattattaaaagggttaatgtatttactatttgacaatttactatttactatttgatactattgttgtctgaggcgttgtttctcccgacgccttacgactaaaatatcgacacaaagcaccatcatcagaggaaggatgaaccacagcaacacatagcctattgtttgtaagtcactttcctgtttctgcttgcccaattccaacttgtccaggctatcggtcagcacatattcatcaggcagccggttgtcactccacttattcaaaattgttccgtcctttaccaacaacagaccaggatttgaacggataatggtcttcagcgtaatatcatctgtctggcagaaagggtattctgctccagtcttgtcacgccacaattctatctcgtcttccggagatgaagtcaaggcataaaagccataaccatgctccacactgtaatcgtatatttcattgataaggtcgatgttactgtcgtccgctccttctatccgatgggcaaccagcagaaacgtatatcctttatccgacagtacgctgtccgttatatcttcccatgtatccagactcatcatggaaaaatcatgaatgggaggttcataacctttttccttcagtatcgtatgtgattctacaaacgtccatgtactgtccggatagttgtccaatgtaaattcctgacgctttcctcctttttccaaaatgaaccggctttcaaacacgcttggtttagcaccttccggaatttccatgccctccttgatattcgctccaattctgtaaggtcggaaatcaagtatcggcaaattctccaggcaatagaaggacaacgcaaacacaaatagaaacgtatacatggaaatcatccactccatcttcggagtaatgaaacgtaccagtaaatcctgccacttgaatacagatactgccgccaccaacaagactacgttcttgccgaaagtctgccaattggtcaatatccacgcatcaccgaaacatccgcagtcagataccggattcgccaaagccaaataaagtgttagcggagtcattacagccatcagcaataacgccaatgcagatgccaccttccggcgtatacccaaaaacaagaaaacacctacactaaactctatggcagacaacactatccctaccagcaaaggtgcataagaaggaaaccaggaaatcatgccgaaagccgtcaagtaatcttgaattttatagaagaagcccaacggatcaacggctttcacaaatccggaaaatatgaacaaagcccccaacagaaaacggcagaggttcacccaaactttcctgataatatgtttcttgtcaatctccaaattcaatcttaattaaaccaaatacagaatagttaatcatatccatataattggcatcaataccttccgaaaccaaagtcgctccggacaagctttcaatctgctttgtccgataaatcttcatcaatatcaaatccgtatacgaactgatacgcatactgcgccaagcctcatcatagtcatgatttttggcaagcatcaactccaaagaggttttggcatatttatcatacagcaccaatgcctcttcattggtcatatcggcagcctcggcatatccaagctccaactgtatcagccctacaattccgtagttgacaatagctatgaattcagaacggatgccttcatctaccaaagtcactcctttcgtttcaatgcttctaatgcggttagctttgatgaatatctggtctgtcacagaagacggacgaagaatgcgccacgccggaccgtaatcatgaagttttttggagaacaagtcacggcaaaccgcaatgacatgttcaaactgttgcttggtatctttcatttccttgcttgtttatgctggaatacagcctattttcacagtgcgctgcaaagataggaataattaaagaaaaagaaaaagagggcactctaaaatctattaaagtaccctcttctatagagattgtttacgtttttatgagcagcgtaatacttgtcccggtctcaggattgttttacgcgtaattctgttcagtttgcaaagcttgtcgatggaggttccctgacgtgctgcaatccgtcccaatgtgtctcccttctttaccttatagaacagaccttcacccgatgccatgctacgcgccgtaccggaagagccttttgtcttatggaaagtataggaatcagctacgatatcctgcttttcaaaatcaaacataagcgcaggattgatgggaatacccaagaaacgggtttcaaagtgaaggtgtgaaccggtagaacgtccggtatttcctcccaatgcaattggctcgccggcttttaccaactggtttgtatcaaccaattgtttagacaagtgtccgtaaacggtttccaagccattgtcgtgacgaataacgacgtatttgccgtatccacgacgaccttgattcttgacaacgcgcacttttccatcaaaagccgcacggattgtatcgcctacatacaccttgatatccaaaccataatgagctcttcttctccggggacggtaaccgaatacatccgtgatacgggtattgggagtaggcatacagaaaccggtcaaatcaaatgtatagctctcaggcacaatcgcattgccataggcttgtacgaattcgttgttccagttgggatacaaatccaaacccggatacaatgattgttctgcacgtatctgtttttgcaaagccagtgaatcaacactcttaagttttctgtcgatgggggcctggcgggcaatcaggtcttgcgagaaagaattcaagctaaccattgccgtcgcagccaataaagcagtttttatccaattaaaattcatccgtttcgtcattcattttgatatccgttgcaagcatctcggcaaatcaaacaccacctgttctatgcgaatatccagattgattttcaaaaattctcccaaaggtaacatttctctctgaaaaacgacatcagtcattaactattttttcgaagaggaggaaactgtaaagctcgcaaagatgtcttaatcccctatagataggagatttacaagcaaacatgttttacaacataaaatgcaataaaagtgcatgtttaaccgttttttcagctaatggcagcccaattaacgttcgtttttctcaacgctttcagttgtcgccacaagacctcgttctcaggcaacatgccatgtggatctgcatccaccaccgtttgcgctacttcacggacatattgcagcagttgtccgtcacgggctatatcggcaatcttcagatcgaaagcaatgccgctctgctgtgtcccttccaaatctccaggaccacgtagtttcaagtctgcttccgctatttcaaagccgtcattagtccgcaccattatctccaaacgcttccttgtatcctccgccaacttgtagccggtaaccagaatacaataggactggtcagctccacgtcctacacgtccccgaagctgatgaagctgggacagcccgaaacgctcggcgttctcaatcaccatcaccgaagcattgggcacatttacacctacctcaatcacggtggtagccaccattatctgtgcctcgccggatacgaacaattgcatctgagcatccttttcagcaggtttcatctttccatgtaccttgcaaaccctacactcgggaaactcttcacaaacatgcagatacccttcttcaaggttctttaagtcaatcttttcgctttccttaatcagcgggtagacaatatagacctgccggccttcggcaatctgcttgtgcatggactgatacaagcttatccgacggctatcaaactgatgaagagtgacaatcggtttacgtcctggaggcaattcatcgatgacagacacatccaggtcgccataaagcgtcattgccaatgtgcggggaatcggggttgccgtcatcaccaatacatggggaggttgtacattctttgtccacaagcgtgcccgttgggccacaccgaaacgatgctgctcgtcaatcacaaccaaaccgagcgaagcaaaattcaccgtatcttcaatgacggcatgggtacctatcagtatatgtatgtctcccgtcaacaaaccggcaaggatagcttcgcgccgcttgcccttaacagaaccggtcaacagttccacacgtacctccattccatacagcagctcacggatggtttcatagtgctggtttgccaaaatctcggtaggtgccatcatgcatgcctgaaaaccattatcgagcgccatcaacatactcatcagtgcaacaagcgtctttccacttcccacatccccttgcagcaagcggttcatctgctttcctgagcctacatccttacggatttccttcaatacccgcttctgtgcattggtcagttcaaaaggaagattacgggagtagaaagtattaaacacttcgcccaccctttcaaaaatataaccgcgatatttccgctgacggtcttttgcatacctcaggatattcaactgtacgtaaaagagctcctcaaacttcaggcgatactgtgccttacgcaataaatccggattagcgggaaagtgtatattgaccaaagcttccgtcaacggcatcagatgatgctcggcaagtatagcgggagaaagggtctcgggcaacggctcacgcaactgctgcaccaccgtattcatcatcttctcgatggcatgcgaattgagagaactccgtttcatcttttcagtcgtattataataaggttgtaaccccatggacgacaatttcaaatccgaagcagagtctatatccggatgagccatatttattctaccattgaagaaggtcggttttccgaacacaatatattcctgatgcactttatacttccctaccaaatatttgatgccctggaaccaaaccaggtccaccacccccgtaccgtccgagaaatgagcaatcaacctgcgctggcgcccttctccagccgtctcaaaacttagtatttcacctttcagctgaatatagggcatcgtcccatcgatctcctgaatataataaatccgactgcggtctacatatttatatggaaagtaatatagcaaatcgtgcaaggagtaaatgcccaattccttattgagcaccgaagcacgctgcggcccgacgcccgacaaatattttatgtcacgcgtggctaaatcgaacatgaacctatcagagctgtggctatttttaaatcaaaaggagtggttattttaatgttttcccgatttcccggcgtcaaaaagacagatacgcccaatgcctccaccacagaagcatcatcggtaaaatggggtgtatagggctgctcgtatgccgctttcagcagtttcgcatcaaaaacctggggagtctgcaccaatctataatcatccctgccgacagtcacactgccttccccttccatacggcgaacggtctccaccacaccgattaccggaattacggcctttttttcggccgccaagtcataacagcgtgcaatcacttcccgggccacgaacggacgcaccccatcgtgcacaccgaccaaagctggtgtcttgaccaaagccaaaccgttctttacagagtggaaccgcgtctcccctccatctgcaatggcatgcggcaatgaaaaacggtactccctgcacagcagcctccagtaatcctgctggctgtggggaagcaccaatattatccgtatctcagcattgtagtcataaaacgcctccagagtgcgcatcaaaacaggtttcccccctatcgggagaaactgtttggggagttcggtccccatgcgcaagcccttaccaccggcaacaatcagagcatactgaaccatttatgatttatgatttatgatttatgatttaaaatcataaatccgttacacacatggcttctttcagttcctgcaccttctctttgccttgcaacagctccactacggccaatgcaaactccatggcagcgcccggtcctttaccagtgatgatattgccgtctctttctaccggagcacccgtacattcggcaccttccaaatactgttcaaagccgggatagcaagtagccttcttgcctttcagcaatcccagcttacccaataccataggagccgcacaaatagcagcaatcggtttctgctcttgggcaaaacgcagtaccagattacgcagttctccacacttctccaaagtggacgcacccggcataccgccaggcaataatacaagctctgcatcaaagaagtcgcagttcactacattcttatcgcacaagaccggaacatcgtgtgctcccgtcactatttcatcaggggttaccgtcaccatttctacgttcagtccggcgcgtctcatcacatccacagaagtaaaagcttctatttcttcaaatccgtcggcaaaaaaaacataaactgtacccataattgttcctcctcttattttagattaaaataatacgttattgttcccgtctgattgttcaagccgcttaccgcattgaaacgggctttcttggcagcatcctctgccgctttccgcaatgcgggattgacggtattggtctggcggttgatgctggttgctatcacatgtccggcagggttcactgtgatggtcaccacaaccctaccttcatcctgcacattatataccggccgcggcaatccgccctcaccaagagaacgtccgcccaaattaaacgagccgtagcctcccgtacccgaagtggctccggacggagcatttcccgtaggacttccttgaataccttcgccttccgtatcgcctttactacccatttgggcacctttgccaaaagcgccagctacccgtttacgggcagcttcctcggcttccttacgttcccgttcggcttttgccgctgccagtttgcgggcctcttccgctttttcggcttccgtcttttccggtttcttcacctcctcctttttcttgggttcggctttgggctttatggcaacggtttcttcagtttcctgcgtaatgatgtcctgctccaccgtttcctgcacctgaggagcggtttcctccggcatgacatccacctttactaaagaagggtcggcagcgcccagtgcatcgggcacctctcccagcataacgggtacaccgccttcttccgagggttccggcggtgtgaatcctaccagtatcagaagggcaataatggcaacatgcaccacaagtgcacctgccatacctatatattttcctttcttcttccgattcaccattgcatttacaatttagccatgtacaatgtacgatttagttttccggtggtcgtgtagccagcaccatcttgaatttattctcgtttgcaatgttcagcaccttcacgatttcccggtaaggcactgtttcgtcagcatacaaagctatatacatttcaggctccctctccgcacacgattgtaggaaaggagtcaattcttcaagcgtcagagacagttccttgtcattgccaaaagcagcataataattcagattcttatctatgataactcttgtcaaaggctttgcagaagtctgttgctttccctgcggcagcagtaccttgatagcattgggcgataccatggtagatgttatcataaagaaaatcagcagcaggaaaatcaggtccgtcatggacgccatactgaaattgggtgatattttagctctacgttttaacacgcctttaagttttaattcttaattctttaattaatcatttcgccggttcgttcaacaaatccatgaatgccattgtcttggcttccatcttgttgaccacgccatctatcaatgtcaccaggtaattgtaggcaaacatagctatgataccgactatcaaaccgcccaccgtagtaatcatcgcctcataaataccaccggaaagcaacgttatatcaatattatttccggcatttgccatttgccaaaatgcacgtaccatacccgtcaccgtgccaaggaagcctagcataggagcgccaccggaaatcgtggccataatcgtcattcccttctccagtttggcaacctcaatattacccacattctcgatggcagcctgcacatcgttcaccgggcgtcccaaacggctgatacccttttcaatcatacgggccgagggagtatccacactgcgacaataagcaatggcagctttcaattccccacccaaaatataatcctttattttatccatgaactgagggtcttctttccccgccttccggataacataattacgttcaaacaagatgtagaaacaaagtacggacatcaaacccaagacaaccataatccagccacctttgatggccatactccataaattcatttcgtcggaagcgtttacttgtgtcagtaccggattggcacctgcaatagagtcagtcagtgccggagccacttgggccaataacaacattacattcatcagcgaagacagtttttatattccttgaccgtacgctccaatcccagatacaacgcgtcactaatcagcgcatgcccgatggacacctcgtccagccacggaatgttttgataaaaataattcagattcaccaggctcagatcatgtccggcattcagccccagacctaagctgcgggccaccttggcagcctcgacaaaaggagctacagccgcttcccgtcctttgggataagccgtagcataaggttccgtatatagctccacgcggtcggcaccggctttggcagcatattctatcatttcggcatcggtggaaacaaatacggaagtacggataccggcattgttgaactcatccaacacttcgttcaagaagtcaaaatgggtcttggtatcccagcctgcgtttgaagtcagctgtgtagggctgtcgggcaccaaagttacctgatgcggtttcaccttcaagaccaaatccataaattcgggtgcaggataaccctcgatattgaactctgtccgcagcaacggccgcaaatcatatacatccttacggcggatatgcctctcgtcaggacggggatgcaccgtaatgccatcagcaccaaagtcttcacaatccagcgctaccttcacaacattcgggacatcacctccacgggcattgcgcagcgttgccaccttatttatattaacgcttaatctagtcataattcggtttatagtttgggacaaaagtacaaataatagttatatattggcagcattctgagaaaaaaatagcatctttgcacttcaatccaacagaattgattatgaaatttgccatattcggaaatacctaccaagcaaagaaatcctcgcatgcagaaaacctcttccggttgctcggacagcatcatgcacagctctgcatctgccgggaatttcatcacttcctgactgccgatttacatctaaacatacctgacgccgaattgtttgacggagatgatttctgtgccgacatgattatcagcatcggtggcgacggcactttcctgaaagcagccagccgtgtaggaaagaagaatatccccatactgggcatcaataccggccggctgggtttccttgccgacatctcaccggaagagatggaagagaccttcgatgaaatctacaacaatcactataaggtagaagagcgtagtgtactgcaactgaggtgcgacgatgaacgcttgatgcaatccccttacgccctcaatgagatagctgtattgaagcgggacagttcgtccatgatcagtatccacgccgccatcaatggcgctccgttgaccacctatcaagctgacggcctggttgtctccacacctaccggttccaccgcctactcactcagcgtcggtggcccggtcatcgtgcctcacagtaaaaccatcgccatcacccctgtggctccacacagcctcaacgtccgtcccatcgttatttgtgacgactgggaaattacacttgatgtggaaagccgcagccataacttcttggttgccatcgacggccgtagcgagtcctgcaaagaaacgacccggttgcacatctcacgtgccgactatagcataaaggtagtcaagcggtacaaccacatcttttttgatacgcttcgtaataaactgatgtggggggcagatatcagataagcctatatcacttcccaaaattcttattcgtatccactgcgaaatgagcgcaatgatattccggcaatttgtcgcattttattaaggacgaaacaaaaaatctataacagcctgattatcaacattattaaacacaatgcattcaatatactactgaaccttattcaatatacgactgaatggcattcactatacgacagaattaggttcagaatacgactctattcaggcccacactatttgtaaacaatacagattattattcagcccttgtttcggctgggaatagatgaaaacgacataccgaaatgagatacctaccacctgtagccgataactgattcaacacgcgacagaagaataaaacaagtccagacgtagaagcaataagaatgtatattttcaaccaaaagcttttaaataaataataaaaacgccacctttgcagtctattcttgcataatctatgtaaaataacactttgtcaaacaaaggaaatgccatttagaatggcgtctataaccttaaatataagatgaattaatatgcagaaggaaaatgatactctattggtagccaaattgagagaaggcaataaatttgcctttgaagcgctgtacgaaaaatatagtgcaaagctgtataacaccattattcttcttgtatatgataagtcattagccaaagacatcacccaaagcagcttcatggcgatatgggaaaaacgcagcaatctggatacagcgaagagctttccggcatatctatgcaccattgcacgcaacatggtatataaagaaaccgaacgcatgctactgcacaacaaatttgtagaaaacaaattgaaaacagaagaagcagctatcgaaggagataccgtggatatggacatctccatcattgaaaaacagatagaacaactactgcaaggcttaccggaaatttcacgaaaggtttttcagctgaagagagcaggagaactgtccaataaggaaatcgcatcccagttagatttgacggaacgtgctgtagaggctcatttctaccgtactatgaaactactgaaagaagaactacgtaaattcatcatgttatttctctccttttactttctaaacaattgttaaaatttaaaattctgtgagtgttttgacagacttgcggatatatattacagaacatggataaaaaagacagtcatattgaactattggatcgtttttttcgtggactgaccagccctgaagaagatgtgcagttaaaatcatggattaagcaaccggattttcaacagaaattttccgtatactatcagcaatgctgggcactggctccggacacgatggacaaagccgtacaaaatgaaatgttcaccgaacttttaagccagatagacgcaagttccaccacggaaacgaaggtcctgaaaacaaggaaccgtttcctgcgtcagattgggcgctatgctgcagttgcctgcatcatattggcagtgggaagcggagcctattatgcaggagtcaaacgaccggccgatgacgccaatacagaagtcaccatgtccgtatccaacgggcagaaggccgacatcattttggctgacggcacaaaggtctacatcaattccgattcaagaattgtatatgacaacacttacaacaagaaaacacgtatggtctccctggaaggagaggcttattttgaagttgcaaaggacaaggaaaagcctttcatcgtgaaagcaaatggcatcaatgtacaagcactaggtacaagcttcaatatacgtgcacataaagacgataaatcagtagctgtaatcctgataagtggaaaggttaaagtagacgacggcagacacgaggcatatatgaagccaaacgaaaggctcgtttgtaacctgaccaatggacagttcgaaaaaagcgagcttcatcctaatgcaagttatttgctatggagaagcaatgaactagcgttctacggtgaatcttttgaagaaatttgtaccatgcttactcgaatgtataattgcaaatttatattcaaaaacgagaaagtaaaacaatatacttatcacggcatcattaagaatagcagtttgaataatgtattagaatacatcagccaagctggcggcattaattacaaaataaaatctgataatacgatcgtaatatattagtagtgtttaataaactctttatgttaacttaaaaaggaaaatatggaatagattttataaactttttacttcaccaaacacaactgccagctttcggcagcaaaataaaattctagtttaaacattcacgagaaattcgtcataagttactctaatatcttattagagcaggtctttggtacgcctttctcaaaataaaaaacaattaatctaatattattagacatgagacaaaacaaaatgattatgcggtctttagtactgctgggtgcactgtttttctggggaaacagcttcgcccaaatcagtttatctgtaaacaagcagaccatcaagcagattataccgcaaattgaaaaagctagcggttataacgtattctacacagacaaacttcccaatcttgaaacaaaaaaggatttaaatgtatcaaatgcttcacttgagaccgtattgaaagaattatttaaaggaacgaaaatctcctttgaaataaaagcaaacaagcagattttgctgttccagcaaaccaacaaatctgtaggtgctaaaaagaaagtaaccggtagaatcgtagacgaaaatgatgagccgcttatcggagcttccgttattatcaaaggctctacacaaggaacaataaccaacattgacggtgaatatacattggaagatgtgccggagaaagctactctaaccgtttcttacgtaggctatataccggcatctgttgctgtcaacggtaaaagcgcaatcaatgtagtgctgcaagaagattcaaagactttggaagaagtagttgttatcggttatggtaccgtaaaaaagaaagacttgaccggtgcagtaggttctgtgggaggtgcagaagtagccgcccgtaaaacaacttccctttccaccgctttacaaggaaccatccctgggttaatggtaacccgtaacaataatgcgcctggtgcaaatgcagacaagatatatgtacgtggtatcacaaccatcgggaattcagatcctttggttatcgttgatggagtacctggtgacatcaattcagtaaatgccaacgacgttgagagcatttctgtattgaaagatgctgcttccgctgctatttatggttctcgtgccgctgctggcgttattcttgtcaccaccaaaagagccagtgacaaggaactgtcattgacctataacggtgaattcggttgggaaatacctaccgcagagcctgaggttgtaggcgtgcaacgttttctggaaatggctaatgaattacgatatacagataatccggacggtggcaaataccaagcctattcagaagatcaagttaataactgggtgaaaaacaatgcaaccaatcccaaccagtatcctataaccgactggcaagatctgattcttgagaagtccgcaacccgtcaaagtcacagtatccacctttcaggcggcagcaaggtcgttaagaccaaagcatccttagcgtatgatgaagtaggcggtctgtacggtgaccgttatttccaacgctatacattacgtgtaaacaatgacttcaacattacccaaaagttaagtgctacattggacttcaatgttaagcgcactaaacaccacatgccgcaattcactccattcggaatgatgcgctacatgcctgctatttatgcaggagtatgggatgacggccgtatagctgaaggcaaatcaggagccaacccttatggattgatgaaattgggtggtacaacaaaaaaatggtacacagcattgggcggtaaagcatctattgatttcaagccttttgacggatttaaaatttcagcaatcgttgctcctcgctttaattacgacaagttcaaaacattcaagaaagcagccagctatacattggcagatgatcccaatacaatagggggatacttagacaacagcggactatacaacacaaccaaactctcagaaacccgcaatgacagctacaatgtcactacacaattaatagcaaactatgcaaagaagtttgccggaaaacatgacatcaaccttatggcaggttacgaaaactattacgaatatattgaagaattaggtgctgacagagacggctacgttctcacgaactttccatacctcaataatggacctaaagatttaattggcaactctggaaaaggaaaagagtacgcttatcgttcctacttcggacgtgtcatgtacagctatgccgacagatatttattccaggccaatatacgtcatgacggctcatcacgttttgcaaagaaacacagatgggggacattcccttccttctctgccggttgggtactcagcgaagaaaatttcatgaagaatcttaattgggactggctgtcattcttgaagattagagctacatggggagcattgggtaatgaacgtattggcgatttcccatatatgtcaaccattgcatttgggaacactattttctatcaaaacaacggtatttattttgaccaaactgcatcccaacagaaatatgccattgaaaatgtaacatgggagaaaactgaatctacagacattggcttagacatttctttcttgaacaaccgcttacgtgtgaacggtgactattactggaaaaatactaaagacatgctattagcaatggctatccctgattttctaggattctctgacccagacgtcaatgccggcaaaatgtcaaccaaaggttatgaattgaatgtcagttggaatgaccacatcggtgacttcagctacggaatagccattaacttctctgacttcacctccaaaatgggggatttacaaggaacccaattcctcggtgacaaagttaaaatggaaggcagtgaattcaatgagtggtatggctatgttagcgatggtcttttcctgacagaagaagacttaaagaattctcccaaaatcaatgataagaacactcaattgggcgatattaaatacaaagacatatctggtcctgacggtgtacccgacggaaagatttctcctgaatatgaccgagtattactaggcagctcattaccccatttcctatatggtggtaatatcaatttggggtacaaaaattttgacctttcattggcattccaaggtgtcggaaaacaaaatgcacgcttggcaagagaaatggtagaaccattccgtaacaattacgggaatttccccgccatcattgatggaaactattggagtccttataatacggacgaacaaaacgcagttgccaaatatcctcgtctaacccatgtaaacaaaagttccaactatgccatgtcagattattggctgttcaacggaggttacttccgtctcaaaaatataactttaggctatacattccctaaagaatggatgaacgcaataggcatcaaaggtgcacgcatttatgccagtgcttccgatctattctgtttgagcaaatatccgaaaggatgggaccctgaaatgggagtaagtgaatatcctatcacaacatctatattgttaggcgtatctgttaacttttaaaagaaagaaaaaaaatgaaacataaatttataatattagctttaggacttggatttttagcaagttcctgcaatgacttggacttagttccattgtctgaggcctccactgaaaactggtattcttcagaagaagaactattgatggctgccaatgaattctataaaataggatattggaataaaatgaaccagggacttctggaacaagccaccgacaacttcacctatagaaatgtgaatcgttgcaacctcctagacggtacagtaaatggtgatggtggaacagagaactggtatccagtagagcaatggcaatcaaactataaatgtataacaatggccaatacatttcttgaaaagtctgagcgcgccgaaaaggctggtgtctctgaaaaaatattgaatcaatacagaggagaagcttactttacaagagcttgtaaatatgcagtactcgtttctttctttggtgatgttgtctggctagataagaatatttacattgaagaagccttccaaaaaggacgtactccaaaagaagagattatacctttaatttaccaagacttcgacaaagcaatttctatgttaccagtatcttataccggtaactcgacacaacgtttcacaaaaggtgctgcgctagccatgaaagcacgttttgccctttacatgggtgattgggaacttgcggccgaatcagctaaagcgtgtatgaatttgcaagcttatcaattacatcccgacttcagcgacttattcttgatgaataccaaaaattctatagaaagcattcttgtattcccacgttccgtgcaatacaacattctatacgatgctactgccacaaaaaatgagctacctagaaatgctggaggatacggttcgtatgcaccctcttgggacttgttggcttcgttcctctgtacagatgggttgcccattgacgagtcacctctttttgatccccacaatcctttcaagaaccgtgacccccgttgtactgccaccattgtagaatttggaacccgccattgtagctttgactttgatcctcatcccgatgcattaaaagtaatgaactacaaaaccggtaaaatggtaaccaaccaagatacccgtgccaatgcacaatacacctcattcaatgcattgctatggaaaaaaggtattgacgattcttgggtagataacaaacaaaaagtggaaagtgactatattgaaatacgttacgcagaagtattgttgacttatgcagaagccatgattgaactgaacaagattgacgaatctgtattagaagccatcaatagtgtacgtgccagagcatacggagtgaaatcttctgaaacagacaaatatccggcagtaacagcacgtgaccaaaagtccttacgccagacagtcagactggaacgtcgcgtagagtttgctaaagaaggactccgctacatggacctcattcgttggaaattggcaaccaaagctctgaacaccaagaactacggcattctatatcctgctgacatattaagagacaaagttacatcaaaaggactgtggttctggcctactacaccacagatagatgaagatggaatcgcagacttctctgctatggaaaaagaaggcttaatccaagtactttcccagcgcaaatgggacgaacggcagtatttatggccaatccccacatctgaaatcatcattaatgaaaacatgaaacagaatccagggtattaacagttaaacattataggtaaaaagattgtgaataaaaggataaacaaactgtaatgaaaggactgccctgcaaattagaaatccagggcagcccttttataccgtttccacaacaaaataaagaaccgcatatttatgagaagaattatattgattttaagtctactgttctgtagccagcttatcacagcctccaatctattgatagaagcagaaagctttgaccaaaaaggaggatgggtagtagaccagcaattcatggatcttatggggtcaccctatctaatggctcatggaatgggagtcccggttgaggatgcttccactaccatatcttttcccgagagcggtacatattatgtatatgtacgtacctataactggacttctccctggtatgatggcaaaggagcaggaaagttcactctaaaaatcggtaataaaaagctgcctatagttttaggtgatgaaggcaaccaatggatgtggcaacccgccggaaaaatttcagtaaaggctgggaatagtaatctaacattaaaagacttgaccggtttcaatggccgttgcgatgctatttattttacaacagaaaaagagcaactacctcctaacgaaactgtacaactgacaaatttccgtaaaaaaatgctggatattccagccgaaccggagcaatactcctatgatgtgattgtaactggtggcggtatagccggtatgtgtgcagccgcagccgcttccagattgggatgcaaagtggcattaatcaacgaccgcccagtacttggcggcaataatagctctgaagtcagggttcacttagggggcaatatcggagtaggccccaattccggactgggacgtatgataagagaattcggacattctaaagaaggaaatgccaaacctgccgcaaactatgaagatgaaaagaaggagctttttatcgccaatgaaaagaatatcaccctttatgccaactaccgcgccatatctgtaaagaccgatggcaacagaatagaatctgtcatcatcaagcatatagagaatggaaaagaagtggaactgaaagcaccattgttctccgactgtaccggagacggcaccatcgggtatctggccggtgcagactacaacatgggacgcgaatcccgtaccgaatacggagaagagctggcaccgattcaaccggacaaaatgacaatgggttcatccgtacaatggtactctgcagacaaaggtaaacctacccgtttccctattttctcgtacggtctgcaattcaatgaaaagaattgcgaaaaagtgacgatgggtgaatggaaatgggaaaccggcatgaacttcaatcaaatcgacgacttcgaacgtatacgtgattatggcttaatggtcatctattctaactggagttttctgaaaaatgaattaaaggacaacaagaaatataagaaccgcgcattggactgggtagcctatattgccgggaaacgcgaatcacgccgattgttgggcgattatattctaaagcaagatgatatagacaaaaatgtctatcacgaagatgcctccttcgtcacaacctggagcatcgacctgcatttcccggattcgctcaatgcgtcacactttcctgatgcgcccttcaaagcagcaaccaaacacatccatatatatccttacgcagtgccctaccgctgcctatattccaggaatatcgagaatctttttatggcaggccgcaatatcagtgttacccatgtggcactgggcactgtccgcgtaatgcgtaccaccggaatgatgggcgaagttgtcgggatggcggcttccttatgtaaaaagtacaacaccactccgagaggagtatatcagaaacacctaccggaattgaaagcactgatgaaagagggagtaggaaaaaaagaagggattcccgataatcagaagttcaatgaacaaaaattattaaaagagcctcgtatatttatcattgaaaaaaacaagaagtaagaaacacgttgatactacaatttaagtattaataaaacacgcatatcatgaaaaatattctaacattattatttgtccttttcggaggatattcgttacacgcacaagatgcttgttacggccgtctgaaaaatgacactttaaccatcggaaacagcttggtcgaacgtacctttttgtggaacgggggaaatatcataacttaccgcctgaccgacaagagtaatggaaaatcatggaagaaccacagccttactccagatttcagagtaacgaaagatttgccgcaaccatcaaacggttcactcaaagtagttcccgtaaaagagactaaaatatttcccgcttatctgaaagtagaagtttctttcagcctggagaagctagatataaaacgggtatatcgtatttatgatgattgtccagccatagcctgcgacacctacctcagaggaacagtaaacagtattttcggaggcagagaagttagtgcagccgaccggaagaatattgaattcgccgaagacatgaaatctaaagaagtaaccgctgtactagaccagttccatttccaaggacaacattggcacgcccgcagcgtggaattttccgatgtgacggactggcacaacaacctggttttcgagaaagagattatttcctatcgcaaactgggatatcgcggcaatctgctgtttgcctttaatggcgaggacaactgtggcatcttctttttaaaagaggctccctgctcttcggtacaattagcctatcaaggaaaggattttctgactgatttcggaaagtttacagtaaccggcctgggcattaccgagaaagacgtgactcccgaccgttggacccaaacatacggatgcgtattgggaatatacggagaagatgaactgagccgactacaagcgcttcgttcatatcagaagaatatacgtacttaccgggccgaccgcgacgagatgattatgatgaacacctggggagaccgtagccaggactcaaaagtaaacgaatccttctgtttgaaagaactggaacgcgccgcccgtctgggaatcacccatttccagattgatgatggctggcaaataggtaaaagccctaattcagctgtagcccgcggttcattcaagaacatttgggacaataaagactactggaaacccgacccgcaaaagtatccacgtggtttgcatcccatcgtaaaacgtggcaaggaattaggtattgaaatcggtctttggttcaatcccagcatacaaaatgattttgccgattggcagaaagatgcgcaagcactcatcagcctttatcgcgaatacggcatcaaagtattcaagatagacgggctcaccattcccagtaaagaagccgaaacaaacctgcaccgcttattcaacaaagtgctggaagagacggacgaggaagtgattttcaaccttgatgcgacagccagccgccgcggaggctaccacatgttcaatgaatatggaaatttctttctggaaaaccgttataccgactggcagaactactatccttactggactttgcgtaacctctggatgctttccaaatatgttccggcagaaaagctgcaaatagagttcctgaacaaatggagaaatacggataaatataaaggagaagtcttcgctccggaaaactattcatttgaatatctgtttgctacgactttagcaggacagccgcttgcctggatggaaggtaccaatctacccgaggaagcatttacattacgagaacatacagaagcctacaagaaatttcagcatgacatgcattccggcactatcctacccataggagatgaaccgtcgggacgctcttggaccggcttccagtctctaaagaaagatagaggatacttgattgtgtaccgtgaaaatcatccagaagggactacagaagtcgaaacctggctgccagaaggtgtcacagtaagatgtatcccattgatgggacacggcaaagcgatgacagcagtaaccggaaagaaaggaaggctggaaatctctctgccatcaatcaatgactatgttgtctacaagtatgagattaaaaacaaacgctaaaataaagactgacatgaaaatcacaaggagtatactcttaatcgccttcttgatgctgttttaccgagccttcggacaacctgccgaacggctgattcggatacagatcactcccaatcatacagactggctatataagccaggcgaaaaaatagaattcagcattacggtactgaaaaacaacgtaccaattcctgacacagaaattcggtaccagatttcagaagatatgatgaagcctcacaaagaaggcatattgcaagctgaaaaagggacagctacggtggaagcccaaacaatggaaaaacctggctttctccgttgccaagcctttgttaaatatggaggacgcgaataccaagggatagtaaccgttggaatcgatccagaaaaattaaaacctatcacatcattgcccgaagactttctaaatttctgggaaacagcaaagctccaggctcaaaagacaccaatggatgtacaaatgactcttgtacccgaacgttgtacagagaaagtgaatgtattccatgtgaatatacagaattatgaatcccatacacgcttatacggcatgctggctatgcctaaagcaaaaggtcgatatcccgcagttttaaagctaccaggtgcaggaatacgttcttatgccggagatgtggaacatgctgccaatggctggattgttttcgaaataggaatacacggtattccggtcaacatgtcaggaccggtatataccaatctctatatgggagcattaaaagggtaccacacgttcaatctggataatcgggataaatactattataaacgtgtatatctaggctgtgtacgtgccattgactttatttattccctaccacaattcgatgggagcaatttgataacattcggcagtagccaaggaggaggattgtccatcgtgacagctggacttgattcacgtgtcaaaggactggtagccttttaccctgctctttgtgacatggtcggctatatacataaccgtgccggaggatggccacacatgtttaacaagcaagaaaatcagactgcagaaaaggcaaatacagcacgttattatgacgcagttaattttgcacgccaaataaaagttcccggattctactcattcggatataatgatatggtctgtccacccactactacctattctgcctacaatgtaattcaagcacccaaacaaatattagtatccgaagaaacggctcattatgcctacccagaacaatgggtagccgcatggaaatgggtcgctgatttctttcaacaaaacaaataaaaactataagaatcatgagaatacttttttttattacaacactgcttttcatcatcccgaacatgttcggacaaaaggaatatcgtctgaactcaccggacggcaagttggaggttaccttatatataggtgaccggatcacttacgagctgacggaagaagggcatacattggtagccccctctcccttatcagtacatctggataatgggacagtctggggtaacggctcccatcttaagagagtcagtcatcgccaggcaaatgaggtgattccctctcctttctacaagcgcagtgaagtaaaggatgtctataatgaaatgacgttaagtttccgggaacatttcaacctcattttcagaatgtacaatgaaggaatggcataccggttcacagcgaccggaaacagaccgttcaaagttacaaacgaagaagccgccttcaacttcaacaaggactacaaatcgattgtcccttatgtaaaagatggcgataaacaaccgatagaggcccagttctccaactcttttgaaaacacctatacacatatagagctatccggactgaacccccaaagactgatgtttacccccgtagtaatagagcaggaaaacggccgtaaactttgtattgccgaatccgacgtggagagctatccgggcatgttcctcatcaacaggaacgggggaacagcactcacttccgcttttgccgccgtccccaaaacaaaaaaacaaggcgggcataaccaactgcaaatattggtcacagagcgtgaaaactacattgcttcctgccagccgaaagccaaactaccctggcgcatcattgttgtggcaagaaatgacaaggagctggcagataacgatatggtttataagctggctgctccatcacgcatgaaagacatctcatggatacgtccgggcaaagtggcctgggaatggtggaaccattggggaatcaaaggcgtggatttcgaagctggaataaacaatgaaacatacatgcactatatcgacttcgcctcccggcatggcatcgagtatgtgattctagatgaaggctgggctgtcaacctcgaggctgacctctttcaggttgtaccggaaatagatttaaagaaactcacgtcctatgccaggcaaaagaatgtaggactcatcctttgggcaggctaccatgcctttgcccgcgacatggaacatgtatgcaggcactattccgaaatgggcatcaagggattcaagattgactttatggacagggatgaccaggaaatggtagacttccactaccgggctgccgaaattgccgctaaatataagttgatggtagactttcacggcacgtacaaacctaccgggctgaaccgcacttatcccaatgtcatcaactatgaagccgttcacgggctggaacagatgaagtggagtgacatccataccgaccaggtaacctacgatgtcaccatgccattcatccgtatgctggccggaccggtggactatacacaaggcgccatgcacaatgccaacaaacggtgttaccactcctcaatggataccccaatgagccagggaacccgttgccgccaattagctgaatatgtagtatttgaatcaccattgaacatgttgtgcgacagtcccaccaattacgaccgtgaagaagaatgcacggaattcatcgctaccatccctaccgtttgggaacaaacagtagccatgaacggagaaattggaaaatacattacaatggcgcgcaggaaaggagatgtctggtatgtcggctccctgaccaattgggatgcacgtactctgacactggacctttctttcctcggtacaggcagatggaaagcggaaatgtttcatgacggagtgaatgccaaccgcctggcttccgactaccaaaagaccgtcacagacattcctgcatcccgtaaactgaccgtcaaaatggcacaaggaggcggatgcgcattgaaaatatacaaagaataattcataggctttttaaacgttaactgatacatacgatttatgaaaattaaaagactaatgattacttgtttgctcgcagtgtctgtactgggaggcaagtcacaagcacaagacttattgtccaatgtttacggacgcgactaccggctactgaatgggaagtggggagccattgtagacctttatgaccaaggggaaaggatgcaggtgtacaaaaacagaaaacctcaagacaacaagcaattttatgaatactctttcgacggaggtttggtcctgaatgtacctgccgatttcaattcacaaatgcccgaattgaaattttatgaagggactgtatggtacggacgctctttcgataccccaaagactgacggcaaacgtttgtttctctatttcggtgcggtaagttaccgtagcaaaatatatctgaacggggaaaaaatagccagccatgaaggtggattcactcccttccaggtggaaatcacagataaggtaaagcaaaaggacaacttcctggtggtgaaagtcaacaatacccgcaccacggatgccatccctgccatgtcctttgactggtggaattacggcggcatcacacgcgatgtaatgttggtaagcgttccacaaagctacatcaaagaccatttcatccagttggacaaggtacaatccaacctgattcgtgccaaagtaaccttatccgaagcaaagcctggcatcaacgtgcaagtcgccatccccgaattgggcatcagacagaacatgactaccgatgccaacggaattgcccaggccactatcaaaaccaaaaaactgcaacgttggtcaccggatgctccaaagctgtatgatgtaaccatcacttcggaaagtgaccggctcaacgagcaaattggtttccgtaacctttatgtaaaaggcgaagatatctatctgaacgaccggcccatcttcctgcgcagtatcagcttccacgaggaaattccgcaacgccgcgggcgtgccttctcagaagcggacgcaacaatgctgttatccgaagccaaagagctgggtgccaacatgattcgtctggcacattatccacaaaatgaatatactgtccgcctggcagaaagaatgggattccttttatgggaagagatacctatctggcaagggattgacttcaagaataccgctacccgtgagaaagcaggcagaatgattaaagagatggtgatgcgcgacaaaaaccgttgttccgttaccttttgggggattgccaatgaaacagccacttccgccccgcgcaatgaatttctgaaacacatgaaacaatgttgcctggacatcgactcaacccgtctgattacggctgccttcgatttggtacgcttcaaccgcgaaagccggaactttgagatgaatgactccattatcaacatcctggacatggtagccatcaacaaatatatgggatggtatcatgactggccactggctccggaccaggctgtctggaatgtagctcccggcaaacctcttttcatttccgagttcggaggcgaagcgctctatggcaaacatggcgacgcggaagtcaagagttcttggagtgaggattatcaggcacaactctacaaggacaatctggaaatgttcaagcatatccccaacctgcgcggaacatcgccgtggattctttttgatttccgttctcccttccgtttccatccacaccagggaggggaatggaaccgtaaaggactggtttccgaccagggacaacgcaaaaaagcatggtacatcatgcgtgattactataaccaaaagaaaacagaacaatgaaacacaaaataaaacactacatggctgccctcctcctgacctctatggtctggagcgggcatgcccaagaaaagaatgaaatggacttgtccggtgaatgggcattccagacagatgtcatggacttccggagaggttcactggacgtacgttactgccatcgcctgcaggaaagcatcgttctgccgggaattacagatgactataaaataggctacaaatctccttaccgccacctggataggctgacccgtgtctacgaatatatgggccccgcatggtaccagcgggaaatagagattcctgcggcatggaaaggcaaacgcattttcctctattttgaacgtacacactggctcagttcggtatatgtaggcaaagaagaagtgagtaaaatagactacatcagtattccccacaaccacgaactgacccaatggctacatccaggcaaaaaagaactgataactttctgcatagacaaccgctaccagtacgatacccataaatgggaccatgcccactccgaatttacccaaataaactggaacggagtattgggcgaaattaaactggtagctgtagacccggtctatgtagatgacatgcaggtctatccggacatcaagaacaaaagcatcaaagtcaaaatgactgtccgcaactgtacagaacataccgccagcggcaaaatatccttccacgtgacaggaaaggactatagactacaaaaggaagtaccagtaacagtgaccgattccattacttatatcgaggaagaaatgtttttgggcaaggatatccatttgtggaatgagttccatcccaatctttatacgttggactgtaagctgacttccagtgtagagggccaatcctatgcgcatgagaaaagcacaactttcggtatgcgcgaagtagaggccggtgaggaccatatcatccttaatggcgaacccatacacctgcgcggtaccgttgaaaacgcagtgttccccaagaccggctatgctcctgtggacgatgcctcttgggaacgtgtactccgtatcctgaaagaatatggtatgaaccatatgcgcttccactcctggtgtcctcctgccgctgcgttccgtatggcagacaagctgggtgtctatctggaggtggaaatgccgatgtggggtaaagatgcccaacccgatgagaagcgctggaatttcttccgtcgcgagctgcggggtatcttgaaagaatatgggaatcacccttccttcattctctactgtaacggaaacgaaattaccggcgatttcagtttcatagaagagcttaccgccacggcccgccagttggataaccgccgtctatacagcggttccacagcccgcacacgtgtcaaatcagaccagttctacattacccatcagactaccaaaggacacatggccatctacgaaggacgtccttatacaaactgggacaaaaacaaggaactgggagtaggcctgcccatcatctcgcatgaatccggacagcggtgcatctatcccaatttcgaggaaataaagaacttcaccggccccgtacaagcgcgtaatttcgagatattccgtgaactgctggacaaaaaccacatgctcgaccaagcacatgacttcttccgtgcttctggagccttgaccgccatagagtacaaggatgtcatagaagcccagttgcgcacttatctgaaaggcggtttccaattactgtctctgaatgattttaccggacaaggatatgcaccggtaggcattctcgatcctttctggaataccaaagggctcatcacaccggaaaagtggcgcgagttctgtgcaccgactgttgcgttgctccgtttcgacaaacgcgcactttacaatgatgaagtatttgaaggaaaagcggaaatatacaattatggacctgccctattgaaaaacgcaaaaatcaattggagtatcaccgacagcaacggtaaaacccttaagagcggaaaactgaaaacacaaactgtcggaaagaacggggtatttccacttggcagtttcagttatgcattgaacaatatcactgaaccacagaagctgacggtccatctttctgttgcacacgtaaaaaacagctgggatatctgggtatatccccgtcatagcaacttaatgcagtccactagtgaagtgctctacaccacagtattcgatgaaaaagcaaaacaacaccttgccgatggcaagaaagtggtactctgccccaaaccttccaaagtaaaaggtcgtaaatcagtgttccacaatcacttctggaatccgataatgttcaaatggcctcctatgaccattggctgtctgattcatgacgaccagcctatattcgagcatttcataacttcctaccatactgactggcagtggtgggacattctggaaaatgccaaggttattgagatgaaggatgctccggcagcactgcggcctttcatacaagtaatagaccattacgacaataatgaaaagctcggtattggtttcgaagcaaaagtgaagaaaggcagtttactggtactggccgtagatacccagaaaaacatcaacgaacgtcctgccacccagcaattgctggaaagcattgaccgctacgtaaagagtgacaaattcgctccgcaaattaccgttgatgagtcctacattgaatcattcttaaagaaataaataaaggaaatatgatgaaattattcttgctttgggttcttttgttgctgccggtcggaccggcagcagcacaagagataaaaatgtcacaaacagctccattggaacaagtttatggagaaacagtagaagatgatgccttactgcccatgaatgaactggatatggattttggctatgccctttatgagacaaccgttgatgtggaagaggagaatcccacactaactattgaaaacgtacgggattatgctgtggtctatgcagacggcaaactgcaaggatatttaaaagatagcagtaaaagcctgaaaaccaatctaccgataggcatacacaaacttagtatctatactgaaaatatcggacgtattacctatggtcctgaaattctggacaattcaaaaggtatctacggcagcataacattgggaaagacagatttagaaggctggaagatgaccccattggaaattaaggaatgcgatgtggccggaataactttcaaagaaggtacctcctccatcccttgcttccgtaaaggttgtgtcacagtaagcaacccggcacaagagacctttcttgacgtatccggctggggaatgggagaagtctggataaacgggcaatacttgggtgcctactgggaagaaaatgcagaaaagaccctggagatacctaccggtgctctgatagcaggtaataatgaaatagtggtatttgaactaaaaaataacgaacaagcttccatgacactaaccgataagcctattttcaaataagctcttgcatgtacttgtttatattccttaaaaaaacgacctttatgtaggagcagattccgaaaaacgtgtcttatttaatgagaatagcataattatatatatcatgaagaaactaacatttatcagttgcctccttttaagtggttgcctggccggagcaatggctgcaaacaaaaagcaacccatctacaaagatgccaaagctcccattgaggagcgtgtgaatgacctggtcagcagaatgacactggaagaaaaggtacaacaactcaaccagtacactttggggcggaataacaacgagaacaatcgtggtgaggaagtaaaaaaaattcctgccacactaggctccctcatttattttgatgaagatgccaatctgcgtaacgaggctcagagaaaagcaatggaagaatcacgtctgggtatccccatccttttcggatacgacgtcatccacgggttccgtaccatttatcccatctctttgggacaagcatgttcttggaatccccaattggtagaacaagcatgtgccgttgccgcccaggaagcacgcatgtccggggtagactggactttttcccctatgattgacgtggcaagagacggacgctggggacgtgttgcagagggctatggcgaagacccttataccaatgctgtattcggtgtcgcatctatcaaaggataccaaggtgaagacatgtccgacagcaagcgagtagccgcctgccttaaacattatatcggatacggcgcttctgaagcaggacgtgactatgtttatacggaaatctccaatcagactctgtgggacacctatattcctccctatgaagctggcgtaaaagccggtgccgctactttaatgagttcattcaatgacatcagcggtactcccggaagcgccaaccattacacgatgacagaaattctgaagaaccgttggaaacacgacggctttgttgtttcagactggtctgcagtaccgcaacttattgaccagggccatgctgccgaccgcaaagaagctgcccgtctagctttcaacgccggcctggaaatggacatgatggggcattgctatgacaggcatatggcaaagctggtggaagaaggtaaaataagcatgcaactggtggacgatgcagtgaaacgcgtgctccgtatcaaattccgccttggactttttgacaatccctacaccccgacatctacagaaaaagagcgcttcctccttccacaaagcctggctattgcagagaaactggcagaggagaccattgttctactgaagaatgaaaacaaggtactccctctggcaaatggaaacaagccaactatcgccgtcatggggcctctggtacaaaacagtgccgagctcctggggtcatggtatggacatggacatgcagaagatgtcctccccatcaaaaaggcgctggatgcagaatttgcaggcaaggccaaactgatttataccgagggttgtggtttcgacggtaacgacacttccaaattcagtgaggcactggctgtagcccagaaagcagatgtcattctactctgcatgggtgaaaagaaaaagtggagtggcgaaaacgcatcgcgttccatcatagaactgcctaccattcaagaggaattcattgctgaaatgaagaaagcaggcaaaccgattgttctggtactggctaacggacgtcctttgggactctctaaagtggaacctctctgtgacgccatcgttgaaatgtggcaaccgggagtacctggcggtaaaccattggcaggtgtcttgtccggccgggtaaatccttcgggcaagctttccattacttttccacgttccaccggacagattccaatctattacaatcagcgcaaaacagcccgtccacaaagtggcaaatatcaagacatcccctcttccccactgtatgaattcggatacggcttgagttataccacctttaattatggtaatatcaacttgcccaaagaaaccatcagacgcggtgaaaagttggtaatggaaatcccagtcaccaatgtaggcaaacgtgacggtgcagaagtggtgcattggtttatctcagacccatttagcacgattacccgtccatgcaaagagttgaagcacttcgaaaagcaactaattaaagcaggtgaaacacatatattccgctttgaaatagacccgatacgtgatcttggttttgtaaatgccaatggtgaacatttccttgaaaatggagaatattatgtaatagtgaaagaccagaaagtaaaattcacggttatagattaatcttctttttatattgtaggccatcctcctttcatcattctaaaagacagatggcctgcaatttctatttttagaacaaataagtatactgttctcctaaaaatttcttgatatgcttcaaggctttggttatttgggcctccaccgtcttgacagaaatacccatttccccggcaatttcttgattagtcttcccttcttccctacttttgcgataaacctgcccacatttgttcggaagggaacaaacagcttcttcaatcaatcgattaagttcttccatctccaccgaagtatcagccgcaagagcatatccatattcttctcctccctcgatgggaaccgtatccttttcatcgcgtaaagcattcaggcaacgattgcgtgcagactggaaaagataagccttgaatgagattttaagagtcaagtcggccctaccctcccataaattcataaaaatggaaagggccagttcttctatctcctgcttgtctctcagataaagggacatgaagcggcagagtgaaacaaaataagtatcgaaaaggtgcttgaaagccttctcgtcatcttgtttgattaactgtaacaataggatatcatcttctgcaggcatatcgaagttatattagataagggcttcttgagcggcaaagatactaatattattcgttcctcgaaatttattaaaaaaataattggaattggaataagggttaaactcaagtgatgtgtcatataagtgaaggcctataaaaacatcatgatcatgaaaaaaagtgttccttggaatttaatcattcctaagttgaaacaggaaatttccgcagacgaagagcggcaattggagacttggttacgcagcagtaacaacgaagcgttattcaaggaattacaactgttatgggaaaaaattcaggcaaatgtagaaaactatacgcccaataccgaatattattggaatgaacttgtcaaccgtatgcacgccagcgagcctaagcagactgaaaaacctgcaaagaaacgcttcgagctgaaacggatataccgctacgcagtagcagcatgtatagctgttgccatcggttgctcattctacataggattccttaacggacagcttgaagccatgccgcagttatactctaatttgtcgggtaagtctaaggttctccttcctgacggaagcgaagtatggatgcatacagagacctctttgcaatacgaatcacaaatgaataaggatgagcgtatcgtaaatgtaactggtgaagcttacttcgatgtagcacacgatgctgacaaaccttttatcgtgcagacagaaggtatgcgtatcgtagttcacggaaccaaattcaatgtcgatgcattccccggttcggaaaatacagtagtgagtttggtagaagggtccgtctctttggaaaccgagacagagaaccgtttcctcaaaccaggcgaaacagctacttttaatcggaaaaccctgacacttaaggtagaaaaagatgatgtacattttgcctcttcgtgggcaaatacacaactcgtattcagaaaccgttcattgggagacatttgcaaactgctttctaaatggtatcgggtaaagatagacgtggatcctacattatccaataaatatttctatacgtttacgttgcgtagcgaaccgctggacgaaatactccgtatcatgtcacgcatccaacctatgaaatatacctttaacgaagagaatgaattgacaatttcgtttgcagacacaaaacaaaaagtaaaatgaaacagtaacaaaaaacttatgccaaacaaatgagaaatgcacgttatttaattaacgaaaagtaaacacctacattaatctttaaatttaagacaattatggatataagaaaacaactcatcattcttatactagtacttctatgtgccccagtttctgcacaaaagaaagagaaactgatcacactgaagttcacaaacatcccattatcagaggctatgccaaaagtggaaaagcaaagcggatacactttcttctatgaatcgcagcaaatagacatcaaacagaaagtcagcctaaatgttaagaatgcaactattaataagacaatagcagccttattgaaagggaccaatgttaaatttgaaatcgacgcaacacacattattttatataccggaaagaataacaaggcaatatccgggcaaccacagaacatctctggtacagtaattgacgaaagtggtgaaccaattatcggagcaaatgtcatggtggaaggaaccaatactggtgtcatcacagatcttgacggaaaatacacgatcaacgcaccggcagggagtaatctcaaaatttcctatatcggttatgtgacacagactgtaaaagctggtagaaacagtaccgtaaagttagtggaagacagtaaaacactggcagaagtcgtggtaatcggctatggtacacaacgtaagtccgacctgactggaggtctggtatcagtagaccagaagaagctgaacatgataaatagcagtaacttaatggaccgtctcgcaggacaaatcccgggcttaagcgtaactactggtgatgcgaaaccaggagcagaccaaaccctccgtgtacgtggtgaaaactcattaagtgccgacaatgcaccgctcatcgtattggacggtattccttacaatggttctttgagtgatattgacccaaacatcatcgaaagccttagtgtcttaaaagatgcttccgcagcagctatctacggctcacgcggttccaatggtgttatcttgattcaatcaaagaaaggcaagaaaggtgcaccccaagttacatacaaagggcagttcagaatgtcgcaaccccaacagactattgatgtgatgactccagacgaatacatcacatttaaacaagacattgcacgcctgaaagatggatggagtggtgaccaattggctcctgagaatattctgagtgccagcgaacttataaattacaagaaaggcgttacaaacgactggcaggactatattttccgcaatgcatttaccatggaacatcaggtaggcatttccggaggtactgaaagtaccacttacatgggggcagtttcctatctggatcaagaaggtgtagtctataactctgccatgaaacgttacaatattaatttgaatgtcacacaagtattaaacaaatggctgactatcggtatacagacccaatttattcaaagagatggcggtggtataaccccgaatattgaacatgctgtaaaacagagtccttatggtatctacaaagatgaaaacggcaagtattatgaagaacctatggaccaatccttgattattaacccgatggccaatgtcaatgccgatcaagatcaaacaagacgtaacttcttcatcaacacctatgctgacattctgttgccggtaaaaggtctttcagcccgtacaacctttggttacaactaccgtagcaactttaccggcacatactatggccgtgacaccaaagacggtagaacagccagcggaaaagccagcatcaataatgagcactactgggattacacttgggaaaacttgctcaagtataatcgtgaatttggcaagcaccgtttcgacgctacaggtttgttcagtgtacaacagactcagaagaaaacttccaattcaagtgccgaaagttttgtaaacgatgactccagctatcataatatcaatgcaggtgagaaaaataagactgtaaagtccagtttatcagaaacctccatgttatcttatatgcttcgtctgaattattcatatgccggaaaatatatgctgaccctaaccggacgttccgatggttattctgccttcggtgcaaacaataagtatgcattcttcccgtcagtggctactgcatggaacattgcttccgaaagctttatggaaaatacccaaaactggttggaccaactgaagctccgcgtatcttatggttccaacggtaaccaagccatcagcccctatcagacgctggaccgtctacatctcacaaactatatctggggtgacggtggagcaggtgtcaatggtgcttatctagccaatgacggcattggaaatccgaatctgaaatgggaaacaacccgaacattcaacgtcggtattgactattcattctttaacggccgcatcaacggtaacattgaaatgtatgtcgccaacacaaaagacttgctgatgaagcgtactgttcctatcatgaacggttataaaactatttgggataatgtgggtaaaacacgtaacaaaggtgttgaattcactttaaacactgtcaacatacgcaataagaatttcgaatggagcaccggaatcatcttctcactaaaccgtgacaagattgtagacctgcgtggtgacaaaaaagatgatatcaccaataagtggttcatcggcaaacctttgcgagtttactacgactatgacgttgacggtatctggcaggaaggtgacaaattcacctatactacagcagacggtaccgaaaaagaaatccaaaaaggtgccaagccaggctctgccaaagtgaaagatgcagacggaaacggttacattgattccaacgataaagtcatcatcggttcaaagaatccaagcttcctgatgtctatgagcaatactctaacctacaaaaatttctatctgtcatttttactgaacggaacattcaaggttacacgtgagctgaatgaagccaatatcggaagttggagttacaatttatacaactatctgcataatgccgattactggacgccggaacataccaatgccaaatatgcttctccggtatataacaacttcgacggacacagctattacaaaaactttacatacatccaaataaaaaatatcactttaggatacaattttgaaaagaatttagtaaagaaattggggctgagtggtttgggagtcaatatcagcgtggaaaatccttatacattctgtgatatacgcagcgtattgaactatgacaacagttggtttgcctcttacccgactgcacgttcctacgtacttggactgaacttatcattctaaacttacttaaatatatatacaatgaaaaattatatatcaaaagcaactctagctctgttagtagctctgtctgctaccggttgctctgactttctggatgagaaactgaaaagtgaactggccccggataacacatatacaagttcctatggtttcgaggtaggttccaccggactttatgcccaagcacgttctgaatataacacttggggtgaaaacggagccttcatgcataatgccgcttgcccttacgaagcattacaaattgccactgaccttgctaccatgggtaccaaagacggttctatccaaccgttcggttatttgacattaactcccaataccggtattgtaggctcctactggaattgggcctacagtctgattgcaggagccaatgagatgttgaaatactctgaaataaacacgaactgggataatagcacagacaaggcgctctatcaagcagaatcacgttttttccgtgcttatgcataccgtacgttggtttatctgtatggagacgttccttatgtggacaagattcaagatcagttcagaattgattttacccgtacaccgaaggaagaggttattgcccacatggtagaagaccttcagtttgctgtcgagaacctgcctaccgaccctgatgccgtaaaagttggcaagctaaccaaatgggcggcagaacacttgttaagtgaggtttacttaatgcaaggtgattatgcaaaggctgaaacagctgcagaaaatgtcatcaacagcggatatttccacttgatggaagaccgcttcggtgaaaaggcaaaagcaaacggcgatgtgttctccgacctattcgttgaaaacaatcaaaatcgcacatccggcaatatggaaagcatttgggtcatgcagtttgaatataacactactggtggcggtacaaattccgatgactggacacgccgtgcctgggaacccaaatacttcgaaattaccggttttgttttggcagactcactgggtggccgcggcttgtcgcaattggtaccaatgaaatggtggattggagaagataccggtttctttgatgaagaagacattcgtaattccgaatacaacatcaaacgtaactggtattacaacaacgagaacatgcccgacctttatggtaaaaaagccacgattacagacgaaacatggtttaccaccttccgtctttatccggctctgacaaaattcttctatggccgttccgaaaacctttctttgaccggttcctaccgtgaccgcatgaagttccgtttgtccgaaacttatctcttactctgcgaggcaaggttgggtttgaaggatatttcaggtgcccgcgaagcaatcaatgtagtacgccgtcgcgcacatgctcctgagattacagacagtgaaatgaccatggacttcttgctggacgaacgtatccgcgagttggtaggtgaagaatcacgccgctttaccttatgccgtaccggcaaattattggagcgtacccgcaaatacaatacagaatcgggtcccgttatgcgtgattaccatacattatggccgattcctcagagcataatcgattcaaatacgggagcagaattcccgcaaaacgaaggatattaacagcacaaagacaaaataaaacacgaataaaggtaaaaagatagttttcaagattctcataaagggaattgtccgcgtccgttgagaacaaaggcaattcccttaattttatcaacaaacaatcatgaagatacacagacaattaacagcaacagcctttctgtttatcagtatggcaatcatggcacaagtgccattcagcaaaaaggaagtaaaagagaaaatgaagcaagtggcggactggcaaatttccaatcctaacactgcccacgaacaccacgacctggactggaccaatggagcactttatgtaggtatggcagattgggcaaaactggcagaagaggagtacaatgacagcacctactatcaatggctctataaaataggaagacggaactgctggcaaccccatcagcgattgtaccatgcagacgatataaccgtttcccaatcattcattgatttataccgtaaatataaaaaagaggaaatactagctcctaccctggcacgtacggaatggatcgtcaaccatccatccaacggtacattcaaactggagtacggtgacaacaaaaccctggaacgctggacctggtgtgacgccttgttcatggcccccccggtttatgccaagctataccgcgaaaccaacaaccggaaatacctccaattcatggacaatgaataccgggctacctacgaatatctattcgataaggaagagaaccttttctaccgagactggcattatttcggcaaaaaagaagccaatggcagaaaggtgttctggggacgtggaaatgcctgggtactggccggattggcagaagtattgcaggagttgcccaaaggcttgatggaacgcgcttattacgaagaactgtttgtccggttatgtacccgtattgccggattgcagaacgaagacggttattggcatgccagccttttggacccggcttcctacccttctcccgaaaccagttctaccggtttctttgtatatgcactggcatatggtgtgaatgcaggtatcttggacgaagatgactttatgccagtcattataaaaggatggaaagcgttgactaatgctgtagatgcaaacggcaaacttggctgggtacaaccgatcggtgccgatcctcgtaaagtcacccgtgacatgacagaagtttacggtgtcggcgcttttcttgcagcaggatgccagatttacaagatggctgtagatacggaagccgattacataaaaatctggccggacaagaaaaccatgcagggaaatcctttgagtggctgggtaatctatgcaaacgagaatgtaagcgatgacttctggaagaaatacgaccatatctatgtaccggaaaaaggaacgaccgtgaagatttccgattatgctcgtacactctatatccgtactcattggagtacattcaatcctgccgaaggagtctacggatgggacacggatgaaaagttgaaaaaagtaattcaaggtgcactcgacagaggcatgcgtctttctttccgcgtgatagtcgatagtcgtgacagaaagaacgaagctactccggcttatgtattcgatgcaggagccaaatactatactgataacgggaaacgttctccctatcccgatgaccctatctttcaggagaaatatgcaaaattcatagaagcgtttgcccagaagtacaataatcccgacttggtagaatttatagatggctacggccttggcaagtggggcgaggcacacaccatgaagtacatcgaccctaaaaaccgtgaaactgtattcaactggatcattgacctgtatctcaagaatttcacgaaggtgcctttagtcatcaactaccaccgttggatgggtgcaggtaaagactgggccggtgaagagaattttgatcccgacagcaaacgtctgttggacagtgcttgtgagaaaggtttttctttacgccatgatgctttcggaatgagagagtattacggccagtgggaacggaattatgtaaagccttggattatgaagcgtccggtattgctggaaggtggctggattgtaagcaaacacccttaccacaatgacccgagcggttacaaaacagccaaagaagttcgtataggagaatttgaagacggccaggaagctcatgtcaatatgatggatttccgtgtaggagacgaaaccatgagttggtttcgtgatgcctatcctctggttgagcgtttcatctccgaaggaggttatcgtttgtatcccgattccattgtggttcccaaagagataaagaacgggacaagaataagaatagcacatcgttggaacaatttaggctggggatactgtcctaccaatataccacaatggaatcagaaatacaaagtagcctttgccttattgaatcaagacaatcagatagcctactcctatctggacagcaataccgatttgtcggtctggattaaagaccatcccacttcttatgagtttactcctaaaatcaagggagtcaagaaaggcaactatacttgggcagtggctttggtagatacgaccaaaggcaatggtagtaatgtaaaaggactgaatatctctgccaaaggtacttacacaaactccggttggctgaaactggcagaagtaactataaagtaaatacattaaaaacacacaaaggtatgatgaaaagaaacgactttcatgtttcaagattatcggcaaggctcctcctgctgcttgccctgctgcttgcctcccccggaggattgcaggcaaaagcaactgacgcagacactcttagagtgctggccataggcaacagtttctcacaagatgcagtggaacaatatctgcacgaactgggaaagtccgaaggttatatcatgattatcggcaacatgtatatcggaggatgttcattggaacggcatgtaaaaaatatacgcaacaatacaccggcctacgcctaccgcaaagtagacaaaaatggggaaagggtagaaatccgagaaatgaccattgagaaagcccttgccgacgaaccatgggactatgtaagcctgcaacaagcaagtccggtatcaggcatttacgaaacatacaaagcgtccctccctgaactggtggattatgtcaaaccacgggtcagtaaaaagacagttttaatgatgcatcaaacttgggcctatgccggcaacagcactcattcgggattcaagaactacaattcaagtcagatgaaaatgtacaccgatattgtcaatgccgttaaggaagcagccggattggtgggcatcaaaaaaatcatcccctccggcactgccatccagaatgcccgcaccacctttataggcgaccacatgaatagggatggctatcatctggacctgaaaataggcagatataccgccgcttgtacctggttcgaagctttgaccggccaaaatgtcataggagccccctactccccaaaaggcatgaactatgacgagaaggaagtagcccagacagcagcacacgcagccatactttgtccggacaaggtcacccatctggtcgacctgaagcagccggccgccaaagccaattacaatgaagtgaatgttcccgaatacaccttgcctgatgcgttgacactggaaaacggaaaaccggtaacaacagcagaacaatggacgaagaaacgccgtcccgaactattgcgactctttgaaacagagatgttcggtaaggctcccaaacatcctaaggacatgcatttcgaagtattgacggaagacagccatgcacttggaggactggctactcgaaaagaagtcaatgtctatcttacaaaggacaacaaaaagtatttcaccatactcatgtacattcccaaccaacgtgcgggaaccgtaccgttgttcttcggactcaacttcaaaggtaaccacaccatcagcaccgaccccggcatatcatatcctacacttgaaaaacaaaaagagttcagatggaggaagctccccgaaagaggtatcgcctcggcacgctggcccatagaaacgattatgaagaacggctatgcgcttgccactatttaccggggagacatcgatcctgatttcgatgacgcctttaaaaacggagttcatcctttgttctacaaaaagggacaacgccgccctgccgataacgaatggggaaccattgcagcatgggcatgggccatgagttgtgccatggactattttgagacggacaaagagatagatgcatccaaagtggctgtcttcggtcattcccgacatggcaaagctgcattatgggccggtgctacagatccacgtttctccctaatcatttccaactgttccggttgcggaggtgcagcgctctcccgccgtgcctttggcgaaacagtccgtgccgtcaaccggcaattcacgcattggttctgccgcaacttctggaaatacaatgataaggaggaaaatttaccgttcgaccaacacgagctcattgccctgcaagctccccgtccggtctacatagccagtgcaaccgaagaccgctgggccgaccccaaaggcgaattcctatccggagtatatgccactcccgtatatgagctttttggcaagaaaggattagagtctacagagatgcctgctacagatacccccgtccgagatggaagcattgcctaccatatccgcaccggaatccatgacattacggtttatgattgggaacaatacatctggttcgctgataaatggttcaaaggcaaataagaaacttccccttcaggacattcggagagatatgagtcaccaggaataaagaaatgagcgcccggacaggataacgaaacccagcatacaatagtccgggactttgtttcctttacatagggacttagtcatacactcttgcagatagaacactgacatgagaaaactttaaaaaacatgaatccgacgaatcaacagagcgtctgaattcgtcggactcacgttaaataatctgagttctatataaaaatcagcgctttaacaactcatctcttttgttgcaaccccttcagcaagtggtccaccgccgctttcagctgtgcatcttctcccttcaaaacagcttccggctcattataaaccaagatgtccggctgtaaagtccggttctccagatagttaccctgcatatccacacaacctacctgcggaataccgaatacaatacttggatcaatctggctttcccaccagacagcagtcatggttcctgccactggagcacctatcagcttaccgatacccaacgtcttgtacacaaaaggagtaccgtgggcattgctgtaattatcctcgcaaaccaacatacacgaaggtttcagccatctatcaaaaggatcgctgccgatgtactggccgcgcggcacaaagcgttcatactccttgccgctaagtaacgtcgctacttgttcgtgcagccatccgcctccgttatggcgggtatccaccacaacagcctctttcttacgactgctttcgctcaacaaatcggagtaaatcttacggaagctcggactatccatacctttgatgtgaatataagcaatgcgcccaccggaatattcatccaccttcttgcgacagttttccacccagcgcttatacaacagctcattctgggcaccgtaagatatgggcttcaaggtttcttcaaaccgctttccggtaacaggattatagaccgagagaatcaccttgcggcctgccttaccttcgagtaacgggaaataatcagcgccagccttaatggcaacaccatccactttctcgataatacagcccggcttgacatccgtctttttcttcgtcaatggactctgagctataatttctttaatcttcagtccatcgcccgcataagcttcatcatagaacactcccaaagctgccgtaggaagtgctgcgcccgaagcataataacgcgctcccgtatgagaaccgttcaattcacccagcatctcactcagcatttccacaaaatcgtagttattgttgatataaggcaagaagcgcttataagtttctttgtatccattccagtccgtaccttgcaagtctgccacatagaacttatcatttacctgctgccagatgtggtcgaagatatattcacgctcaccgtaaggacggtaatcgaagaaagcctcaaattcaattggagaaatcttgctgccttcaatctctatcttcttcattccgtcgcgggcacaaaggaagatattcttcccttccttgtcaggctgcaaagcgcctgcacctactttcttcaaaagaacttttgtaacattctctttcagattgtgctcccaaagatcgtacccatcctcaaaaacagacagataatagagtttatcccctttagcagaaagcatggcatctgccatatgcgaggaattgacggtcaggcgtacaatacggtcaaagcggtttgcgagatcgaacttcaacggctctacctttttctccttatctttgtcggcatcctcttttttcttcttggcatccttttcgtctttcttcccggctttttccttctctgccttctccacttcctcaagcaaagtggtttcttccttgttcatcaagaaacggtcgtatgcttcagcatcaaagaacatgatataagtatcgtcttcggctccccaactgccgtggctgcgataccccgcacggtcactggtccaaatcatggcttttccgtccaatacccatttggcattgccatcgttgtatccgctttcggtcaggttcaccatttcacccttaccatcggcattcagcagcacaacatctttgttgttccatccacctacaccgatatagtccgaaagaatccatttgctgtccggactccactggaaccactggtcaccgtccgaataagagtattggtacttgccatccataacggtacgcacagccttcgtcttcagattgatgacacggatggcgctacggttttcgagaaaagcaatctctttaccgtcggggctgtattggggttggaaagaagcggcatccgagtttgtcaggcgttcttccttcagctctgtggcataggtaaacagcttctcgtccttacgcacaatcgtcgaagtgtaaagttgccaaagcccgccgcgttcggaagcataaaccagtgtccgcccatcgggggcaaagtctacggtacgttcctgacaaggagtattcgttatctgcttcgtagtcttatattccactgaagtgacgtagacatcgccgcgcaaaacgaaagccacttccttaccatccggagacactgccatttccgtggcgccactactcttaatctggcggataatatccttgtcgtttctgtcggaaacaatgcagatgttcaccttttgcgcttctccactgggaagcagggtataaatctcaccatcaaatccatagcacaaccttccgtccgtagcggcactgagataacgtaccggatttttggtatagtgcgtcaactgcacggccttcgcatctccgggagtacgtcggtagatattgaaagagccgttttcctcactcagatagtagaatgtttttccatcaggagcccaaaccggttcacggtcttctcctccgaaagtagtcagttggcggtactgcggttcttttcccggagtatacatccagatgtcccgggcaatgggcgatacgtgatgtttacgccagtagtcctcgtaacctttcttatcctgatacaacatcgctccctccttattgatggagatgcactccataggcatggacgaaatcatcgtcggacgccctccctccactgatactcgatagacctggttgaactgcccgttagagggaaagacaacagcctcagcagacggcatgatgcctgcagagaacaggatatgtccggcatctgtaaaagcaagcggtgtttcgcttcccgagtgggtagtcagccgtcgtggttcgcctccgtctttggacacaatgtagacgtccaggcttcccatacggtccgaagcaaaagcaacctgcttactgtccggactccataccggatccgtatcatatgcaggattggtagttatctgcatggcacgtccaccggtaaccggcaccgtataaatatctcccttatacgtaaaagcaatggtggtcccatcgggagagataacactatgacgcatccagagcggagcatcttgcgcaaaagtaaaacctgccaggcaagcggcagcaatacctaatagtagttttttcataatgattctttttgggggataaaaaaagcctcacgtcttttccttgtcagaaaaagtccgtgaggcttgcttatttctctttaagttaccctcaattagagagctcctacttccttcaaagcagcatttgtcttgtgaacggcagcagcgctggcagcaaatttagctttttcgtcagcagtcagttccagttcaacgattttctcgataccgttcttgccaaggattacgggaacaccgatacagatgtctgattcaccgtattctccttccagatatactgaacaaggaatcatcttcttctggttgtggatgatagactcaactacataagcgcctgccgcacccggagcataccatgcagaagtacccagcaacttagtcagtgtagcaccgcctaccatggtagaagctactacttcgttcagtttttcttcgctcagcagtgtgcttaccggctgtcctttgtaagtagccagacgagccaacggaatcatggtagtatcaccgtgaccaccgataaccatgccttctacttcgttggcgttgcagcccaaagcctgagacaagaaatatttgaaacgagagctgtccaaagcaccacccataccgatgatacggttcttcggcaagcccaaagacttcaatgacagataggtcatggtatccatcggattagaaataaccacgaggatagcattcggagaatatttcaagatgttctgtgcaaccgacttaacgatacctgcattaacaccgatcaattcttcacgagtcatacccggcttacggggaataccggaagtaatcactacaacgtcggagttggcagtcttctcataatcgttggtacaacctacaacagtggtgtcgaagcccagcagttgagcagtctgcatcatatccattgccttaccttctgaaacgccttctttcacgtccagcattaccacttcgtcagccacttcattaaaggccaacacattagcgcatgtagcacctacgttacctgcacctactacggttacttttgacataatttctaaagttttttgtttataagtattctttaaagatgatacaaaagtacagcgaacttcgtaattagagaaatatttccgtaataattttagttaaatacacatttagccaacgattagtggacgatgattaatgattaatgattaattttgcggacgattagtgaacgtaagacgaataatcagtcaccaaccattaatcacttaaccattaatcattatcaaaaatggcagttaagaagaatacacttctcatcgtggcaggcagcctccttatcttattattaataggagttaccattctgctgatttccgaaaagcaaaccaacaaggaactggtgatggaattcaatctggataaagaagaccttgaaaatcaatacacagacttcgccagacaatatgacgaactgaagctgaccgtctccaacgactccctctccgtacttttggagcaggaacaactgaagacccaacgtttattggaagaactccgcaccgtgaagagcagcaatgccaccgagatacgccgtctgaagaaggaactggcctctctccgcaaagtcatgataggctatatcaaccagattgactcgctgaaccgcctgactgcccaacagaaggaaatcatagccgatgtcacccaaaagtacaacgccgcttcccggcaaatcagcaacttgtccgaagaaaagaagaacctgaccaagacagtgacgcttgccgcacaactggacgccaccaacatctctgtgcagcccaccaacaaacgcggcaagactgccaagaaagtgaaagacatcgtgaagttcaaaataaacttctccatcgtgaaaaacatcactgcagaaaccggcgaacgcaccctctacatccgcatcaccaaaccggacaatgacgtgctgaccaaaagtccctcaaacaccttcccatacgagaaccgggaactggtatattccatcaagaagtatatagaatacaacggagaagagcaaaccgtcaccgtatattgggatgtagaagaatacctctatgcaggtacctaccgcgtagacatttttactgacggcacccttatcggttcacaatcattcaacttgaattaatacatttttcagacaagtaagaacaaaagagcataaaacatgcggcatactactgatttcgtaacgctgcaaaatgtgttcttttgttcttatgcctaaaaaaatttctaaattattttgcaatatcattgaaagcctatacatttgcatcgttgtttatgcaattattgttgttgtataagtaaccgattcatcaccttaattaatgtatagcccaatgaaaaagttcttctgtttcatctgtttggcatacctgtccttccccgtgaaggcccaggaagcattgagcttggatagttgccgtgcattggcaatttccaacaacaaagaactgctgataagccaagaaaaaatcaacgctgcacattatcaaaaaaaggcggcattcaccaattaccttcccaacatttcggccaccggtggatatatgcgcagccaaaaagagttgtctatcctcagtgatgcccaaaaaggggccttgtccggattgggtacaaacctcagcggccccttgcaacaagccgcccaagtcatagcgcagcttcatcctgaaatagcggggaaactgccggctttaggacaaagcctggtaggtgccctcgacggtgcaggccaatccttggttgacgcctttcgtacagacacccgcaacatgtatgcgggcgcactgaccttgacccaacccctatatatgggcggcaagatacgtgcctacaataaaatcaccaaatacgccgaagagctggcccgccagcagcacaacaccggtatgcaggaagtaatcctgagtacagaccaggcatattggcaggtagtatcccttgcccataaaaagaagctggcagaaggttatctgaaactactgcagaaactcgacagcgacgtcgacaaaatgattgcccaaggcgttgccaccaaagcagacggactctccatcaaagtaaaagtgaatgaagccgaaatgactctgaccaaagtaaccgatggcttgagccttgcccggatgctgctgtgccaactgtgtggtcttgacctttccactcctatcatgctcgcagacgaacagaaggaagacctggcccccacaactctgaaaaacggtgccatcgacatcaacaacgtttatgccactcgccccgaagtacgcagcctggaacttgccacacggatttacaagcaaaaagtaaatgtcacccgttcggaatatcttccttccatagcactaatgggcagctatatggcaaccaacccttccgtcttcaatagttttgagaagaagttcaaaggaatgtggaacgtgggtgtcatggtatcggtacccatctggcactggggcgaaggcatctataaagtaaaagcagccaaatcggaagcacgcatcgcccaataccagttggatgacgccaaagaaaagatagagctacaggtcaaccagtctgctttccaagtgaacgaagctgccaaaaaactgaccatggccgaaaagaacctggaaaaagccaacgagaacctgagatacgccacactcggctttgaggaaggcgttatacccgccagcaatgtgctcgaagcgcataccgcatggctttctgctcaatcggaaaagatagacgcacagattgacgtaaaactgacggaaatctatctgagaaaggcaacgggggaattgacaattgataattgatcgtttcttcaatcataaattgtaaatagtaaataatatgttagatacaaaatcacaaaacagcaacatgttgttggcattcctcacactgacgggagttattgccatcgttgcccttgtaggtttcttcatgttgcgtaaagggccggagattgtgcaaggacaagcagaagtaacggagtatcgagtatcgagcaaagtgccgggacgtattctggaatttcgtgtaaaagagggacaaagcgtacaagccggagacacccttgccattttggaggctccggacgtgcaggccaaactggaacaagcacgcgccgccgaatcggcagcccaggcccagaacgaaaaagctttgaaaggcgcccgtcgggaacagatacaagctgcctatgaaatgtggcaaaaggcactggccggactggagattgccgaaaaatcctacacgcgtgtgaagaacctgcacgaccaaggcgtgatgtctgcacaaaagcttgacgaagttaccgcccaacgcaatgcagcccaggctacagagaaagccgccaaagcccagtatgatatggccaagaacggtgcggaacgcgaggacaaagccgctgccgctgccttggtggaacgtgctaaaggagctgtggccgaagttgaatcgtacatcaaggaaacttacctgattgcacagactgccggtgaggtatccgagatattccccaaagtaggcgagcttgtgggcacgggtgctcccattatgaacatcgctattctggatgacatgtgggtaaccttcaatgtacgcgaggacttgctgcaagggttgggtatgaataccgaattcgaagcgttcatccctgccctcgataggaatatccgcctgaaagtgtactacatgaaagacctcggcacatatgccgcttggaaagcgaccaagactaccggccagttcgacctgaaaacattcgaagtaaaagccgctccgcaagagaaggtggaaggactgcgtccgggaatgagtgtgatattggagaaataaaaggagttatgagttattggggaggatgatggaaagagataagaaacatacggctttgtggaatgtagcaagacgcgaatgccgccgtcttgtttcccgcccgctctatctgttctgtatggtgatagcaccgttgttctgctacatattcttcaccacgttgatggactccgggcttcctacggacatgcccgtaggtgtggtagaccaggacatgagtgccacttcacgccagctgatacgtaacttggacgcttttgagcagacagccgtcgtggctcgctatcccaatatcaacgaagcccgcaccgccatgcagcgcggagagatttacggcttcttctatatacccgaaggcacctccgccaaggcgcaggcgcaacggcagcccaaactctcgttctacaccaacaacacactactcattgccggctcactgctcttcaaagatatgaagatgatgagcgaactggcatcgggagccgccgcccgcaccgccctctatgccaaaggcgctaccgaggagcaagcgatggccttcctccagcccatcgtcatagatacgcatccactcaataacccgtggctgaactactccgtatatctgtgcaacacctttgcaccgggtgtactgatgctgcttatcttcatggtgaccgtctattccatcggagttgagataaaagaccgcacagcccgcgaatggctgcgcatgggcaacaactccatctggatttcccttaccggcaaactgctgccgcataccgccatcttcttcctgatgggaatattatataatgtatacctctacggtttcctccattttccctgcaacagcggcatcctgccgatgctgcttgccaccctttgcctggtgctggcatcgcaaggcatgggaatattgatgataggaaccctgcctaccctgcgtctgggactcagtttcgcttccctatggggcgtactctctttctccatgtgcggattgtcattccccgccatgggcatgcaccccgtattgcaggcattggcaaatctgttccccctgcgccactatttcctgatttatgtggaccaggcactgaatggataccccatgatttactcgtgggtcaactacgtagcgctgcttattttcatgatgctcccgttccttatagcccataggctgaaaggagcgttggtttactataaatacatgccctaatgaaagacctgacgttcagacagaaaatgatacaaggcattcatgacttgttctatatatggaaacgggaattcggtacaaccttccgcgaccagggcgtgctcatcttcttcgtgctcgttccgttggtctatccgttgatatatgctttcatctataccaacgaaaccatccacgaagtgcccactgtcgtggtggatgactcacgctcctcgttgagccgcgaatacctgcggaaagtggactccagtcccgaagtgagcctcgtgagctactgcgccgatatggaagaagccaaactgatgttgaaagaccgcagggcatacggcattatctacatcccctccagcttcagcgacgacattgtacgcggtaagcagacgcaggtcagtatcttctgcgacatgagcggactgctgtattacaaagccttgctgaccgccaacaccaacgtgtcgctcgccatgaacgcagacatcaaagtggagcgaagcgccaataccaccgaccgccaggacaagattaccgcctacccgatagagtatgaggatgtcgccctctataatccgaccaacggatttgccgctttcctgattccggcagtattggtattgattatccagcaaacgctgctactcggcatcggcttgtctgccgggacggcacgcgaacagaaccgcttccgcgacctggtgcctatcaaccgccactacaacggcacactacgcattgtgatgggaaaagggctgagctacttcatggtatattcactggtatcggtatatatactgtgtgtggttccatggcttttcagcctcaaccaaatagcgatacccggtgtcctgactctgttcaccctgccctacctggccgcttgtattttctttgccatgacagcatccattgccatccgcaaccgcgaaacgtgcatgctgctgttcgtgttcacctcagtgccgctgctgttcctctccggcatttcgtggccgggagccgccatgcctgctttctggaagtacttctcgtacatcttcccttctaccttcggcatcaacggctacgtacgcatcaacagtatgggagccacactcaatgaagtctctttcgagtatcaggcactatggatacaaacgggcttctacttcatcaccacgtgtctggtatatcgctggcagatattgcagagcaggaaacatgtaattgaagagtataagaagcataagagtatagaagcgtaacacatcgttccaagcctacgaaacaaagtgttcacatacgtttgaacactttgtttcagtgtatcagaacaatttgttccaatatataaaaacagtttgttcgccatattgaaacagtctgttcccttataggaaacagactgttttgttaaaggaaacaaatagttgccctacagcatcggcaaggcagcaaacagacaaacggggctgtaatacctaattacggtcgcatgtgtttctctaatattgggtaaagtatctcagcatacctcataaagcccaaatcggtaaaatgaatgccgtctaccgtagcctccccgtcgtggccaataatgtcacgggaagaaaggaaatagatgtttttctctccacgttgcttcaaagaacgaaaaaaggcattcaatgtctcattcttgtccttcacctccttggcaatcctggtgtcaaaaggagagtgggtaaagagagggtcttccacgaaaagaacaggcgtatcgggatgcttgctgcgaataatggtatagaatttatcggcacgctctctcatttgctccacggtagcattgggcacaaagtcgaggacaaacatagaagcgtccacaccggctatgacatcggcaatctccaggtcgagcaaggcattgccgctaaagcccagattgatacactcacgattgagccaacgttccagaatattggtatgtgccatgccgggacgggaagcgcagcctccctgcaagatgctggtaccatagaatactaccggcttctcacgtttcggcaagtccactgccggtggagtgatggcagatagggaatccactccgatggaaagcgaggtaaccccgtcatataaagaaaggtacaaaaggtattcgcgctcctcgggcaacatattgcttacgatagtcgccttgctgaccttgccctgcggacgaccgctaccggcaaatatccatttgccgtcttgcaggcagtagaggtcgaggcctttaataccggtaggcgtcatgtggttcatactcatattgttccttacttcccatttggcggaaatgcttgtagagttggaacggaagcgcacggcaagtccggcactgttgcggcccaagtcccacaaaggcttgcgggagatgttctgcagagagtccggcagacgctcatagcgggtaagggtagattctgttgctttgcccaaaagggggaaggcggaagcatcatgatagacagtctgtgcatcggcaacagcagccaacaacaagcccatcagaagaattctggttttcatatgacaagatattaagtgttaagtatcagacggcaaagatacaaggtttctttgaaaaacgaagaaatggaagcattttacatcaattaactcccacatgcttgtttctttacgaaacattcgtattttcgcaaaaaacaattcatatgaaacacatccatttcctcttagcaggcttcctactgtgcatctgctgtaccctgcaagccaaaaaccgtgtgattgaccaaccaccgttcatcgtaagaaacacgacttccatcgaagtgagcaaagtagtcatcagtgacacggcaaccgtgctccacatctatgccaagtatcgtcccaagtactggatacagattgcacccgacagctacctgacagacaataacggagaaacctaccaactgcgttccggcataggcatcacaccaggcaaggaattttggatgcccgaatcgggcgaagcggaattccaactggtctttcctcccctatccgacaatgctacctccttcgacttcaccgaaggcgaaaaggtggaaaacggattcagcatctggggaatacagctgaaaagcaagaaactgccggaattggcacttccccaaaacgccgtagtgcacaaaaccgaccctaatgccgaacttcccgaaccggtcatccaatatggaaaagccatgctgaaagggaaactcctggattcacgccccaatatggcaatgccaatcagtattgccgtgtgggagaatatcaaaggagacatcatggacataccactcgacatccagcctgacggcagtttcaccaaagaaataacgttgcccggcactaccccatgtaccatgtatctgggtagagaacatatgctccagttcttcatggaaccgggcaagacaacagaaatatacgtcaatctacgcgaagcttcccgacgcaagtctaaattccacagcaaggggaaaacctatggagaaatggtatacatcaacgggcctctagaaaccgtggcacaagagttgaacggaaaccaccccgacatcaacatgcaagacaagctctatcaaaacatagctgcactggctggcaaggatattgatgcagccaaaacatacgtactccaaatatccggcgaaacacaagaagcaatagacaagttaccttacagtgtttctacccgacaacttctgaccatcaataacaaactgactacgaatgccatgctgtcttccgttgccagcatcttgacatcggctgccctacaagccaatctcatcaaacgggaggaagcaaacaactactatcaggaactttcccggaaagtgtcctccaactacgtgtccgacgaggacatgagcatattgaatgtaccgcaggcagtcttgtccaaccagtatgtacaaatggctccaagaaatgtagaacggagcgaggaactggccaaagcatggggaacagataaaggcatcttcttcgatatagcccgtaatgtcaccctctaccggggtatcaagaacttcaccccactcaccgacgagcaaaaggcaaccgttgccgccatgcccgccgcataccgcgaaatgctgactgctgccaatgacgagttgcttgcacagctcgaagccaacaagaaaaagacgggttacaccatcaaccaagtggataccaacgtcaacaacgaagagttgtttacttccatcatcagcaaattcaaaggaaaagtattgttagtagatttctgggccacctggtgcggtccatgccgtatggcaaacaagatgatggtccccatgaaggaggaactgaaaggtaaggacattgtatatctgtacatcaccggtgaaacctcccccttgaagacctgggagaatatgattcccgacatccacggcgaacacttccgcctgacagatacccaatggaaatacctctcggacgcattcaagatagaaggggtaccgacttatctgattgtagaccgagaaggaaacaccacgttcaggcaaactggtttcccgggagtggaaaagatgaaggaggaattattgaaagttactaaatgacaaactgataaaacaaaaaacagcagggataggcgagggcactgaaaaagtcccccatatagtagcgtcctaaaaaaatcggcacatattcaggcaaaagcttgagtatgtgccgatttttttgtaactttatggtagtaatcagacagatatgctaccactacaacagactatacagttcagtaattattcggatctatacgatttgattattcctcgtaacaacctattgcgtcagataaatgatttgatagacttttcttttattaaaaaagaactcgttgacaagtattgtcaagacaatggaaggatggccgaatgtcccatccggatgttcaaatatcttctgttgaaaacaatctatgacatatccgatgtcgatgttgtggaacgatcaagatatgatatgtctttcaaatactttcttgggatgagtccggaggaaacagatttgattaatccgagctcattatgcaagtttcgcaagttgcgtctaaaagataaagatctactggatttgctgattggcaagactgttggcatagctatagaaaagggcataataaagtctcgcacgattatagttgatgccacccataccggctcacgcagcaatccttggtcacccttggagagtctaagattgcgctcgaagcaattgcgcaaaagcatatatgatgccgacgagaccgaaaagagcaatctgccttcgaagaacacggatgacaacattgagcatgagcttgactatacaaaggcattgcttgatgtagttagctcaaatccctcattggcagagatacccaaggtcaaagagcggctgaatatgctcaaggaggtacttgccgatattgaagaccattatatgacatcaaaagatgaagatgcacgggtgggtcacaagagcgaggatgactcgtttttcggctacaagacacatattgccatgagcgatgagcgtataatcactgccgccacagtgacttcgggagagaagggtgatggcccacaacttgaagagctggtaaaccagagccgtgccaacggaatgacggtggaaacagtcgttggagacacagcttattcaggtaaagacaacatcatattatcgaacaatgaagagaatggttttgagctagttgcaagattaaatccagccataagcaatggattccgtaaggatgaggataaatttgatttcaataaagacgctggcatgtttgtttgcccggctggccatatggcaattaggcgcgctgtacaaggaaagaaaggacagggaacgaatcagtcaatggtctatttctttgatgtagataaatgcaagttatgttcaaggcgagagggatgctacaaagaaggcgcaaaatctaaaacatattctgttcaaataaaatcatcagagcatcagcagcatgaggcgtttgagaaatcggaagagttcaggagtaaagcaaaagtgagatataagatagaggccaagaactccgaattaaaaaatgtattagggtatgaccgagcatggtcatacggaatagaatgtatgcgtatgcaaggggctatggttatctttgtagcaaatatcaagagaatcctcaaactcagatgaggggagagccttttcgttctctaaaaagcccttaattggccgtttttaagctttacagggcaagtaaccgctaaattcttagattcaaaagtagaaaaataagttcgccaaatccaattatatggacttggcgaacctttcattttattgcctttagagagcctttttcagtgccctcgggataggcctgctgttttttgttttatcagtataccgttattacttttcagcccattccttggctccctgctccttcagtttagcagtgaatgcctttgccttctccatagcagccgcttcctcttccggacttgcatacgcatgcttgtagcctttcaccacattccattcaccacgggtgaaatcggggaatgccacagccgcacaaccgttgtccatggaaagttctcccagttctgcaaggcagcaccactcagcaaggtcgtatacatccatatccaaaggaagaccgttctgcaggcaatataccagacggctgtccatcacgaagtccatgccaccatgacctcctacttccttcgccatctcaccgtacttcttcaaaatgggatgctggtatttctccacgagtgcctccatctccgtttccggtaggaaaccgtgtgaattcaaatcatccactttgggctgaacgcccgatgcactcagctggtcagcgtcaagcgcatacccttctaccggatatttgttggcgaatcccttggttcccgtaagctgatacagacggttatagggttgtggcgtcattacattgtgctgaatctcaatcacctttccattggctgtacgaatcatggtcgtggtatggtcaccgttacggaattccttgcactcctcgccggttcttttctctaccaactccttgcccactacagatttggtgtccatggctaccagcgtttccatacggtcaccacggtgaatatccagtgcttgcgccaccggaccaaggccgtgagtggcatacacgtcaccgcgatgcttcatgttgtagtccaaacgccagcccaacttgtcattttctccattcttccagtaataatcccaaaacgggctcaagttatgtatataagcaccttgtgcacggataacttcaccgaatacgccatgctgcgccatgttcagcgtattcatctcgaaccagtcatagcaacagttctccaagatgaagcaatgcttgcgggtagactcactcaagttaatcaaatcccagcattcctgcaggttcatggccgaaggcacttctatcgctacattctttccgttctccagcgcacatttggcaacggggaagtgatgcagccagtccgcagcaatataaaccaagtctatatcatcacgcttgcaaagttcctcgtatcccttgtcaccggaatagacggcggctttgggcatggatgccttcttcaagagctcctgacatttatctgcacgggcctcttcataatcacaaagagccactacctgcgtacccggaatataagtgaaacgctccactgctccgggaccacgcatccccaaaccaacaaaacccacacgcactgcctccagcttcggagtagtcagtcccaatacactcttttgtccttccggacgctcgggagtcttgacaacaatggtaccattttgccattcccattgagttcccttctctgtggtttgcacagtagaagtctggcttgtgcatgcacccaatacgaagcacattcccagcaacaacgatttaactgttcccatatttctgctttatttaaggtaaaagaattaattgcaacaaagatagacaatcttaaccaaaagaagattatcaacagccatgttcttttcaatcagacaaaagaatatacatacagtaaacgcatttagattaattaactcactgtttgatgccagtttacgaaatattcgtagatttgtattgaattcatttaaatactttatccatggaaaagttaacgatacaagaagaagaagcaatgttgtacatttgggaactgggcagttgcttcgtaaaagacattgttgccaaatatcccaaaccggcgcctccctacacaacagtagcatctattgtgaaaaacctggagcgcaagcaatatatccgtgccgcacgtgtaggcaatacctaccagtataccccgcttatacgcgaaagcgaatacaaacgtacctttatgagcggttttgtgcgcaactactttgaaaattcttataaggaaatggtttcgttcttcgccaaagaccagaagatttcggccaatgacctgaaagacattatagatatgatagagaaaggaaaggagtaaacatgttagcctattttctgaaagtgaatgtagcgatagtactgttttatgcattctatcggctgttcttctacaaagacacatttttcggctggcgcagaaccgcactgctttgtttctttgccgtttccgctgccgtacctttgctgaacatacaaacgtggattacggagcaggaaccgatggtggccatggcagatctctatgccagcgttgtgctaccggaactcacagtaggcacagaagtggctccgaccgactggaaaagcatcctttcagaatatgccaatatcgcctattggggaatagtggcattgctgatgatacgcctcatcatgcaactggcaggcatcatccgcctaacatgccgatgccgcaagatacaaataggcaacacaagtatacatctacttcccaaagcagacgggcctttctcttttttccactggatttttatccacccgtcctcgcatacggaagaggagttcaacgaaatattgacccatgagcagacacatgcccggcaatggcactccattgatgtcatcatcagtgaactggtgtgcattttctgctggtgtaatccatttgcctggctcatgaaacgggaaatccgtaccaatctggaatatatggccgacgcccgcgtattggaaaacggctatgactccaaaacctatcaataccatttgttaggattgtcacatcaaaaggctgcagtaaccatctataacagtttcaatgttttacctctaaaaaaacgcatcaagatgatgaacaaaaagagaaccaaagaaataggaagaaccaaatatttgatgttccttcctttagcggccttacttatgattgtcagcaatatcgaaaccgtagcgcgtaccacaaagaagattgcggtggaagtcatagaagctgtagatccccaaaccgaacaaccggcaccggaagttcaagaccctcaagtagctccccaaccggaacaagacacgaaaaccgtgacttacaaaggaaaggtagtggacaaggatggaaagccaatacaaggtgtgaaaatactaagtgttcctaattctactcctaccgaagtcactacccaagccgatggaagttttgaattcaaagcctctcccaaagcaaaattattattcttatatcaagacggaaacaaaaagaaaggcatctctttcactgatgaaagattacccaaagaaaacaaaacgaattggacaatcgtttacaatgagaaatggaatgaagtcatgcaaagcgacccgggaactccagacaatccgattttcgaggtagtagagcatatgcccgaattcactggtggaggtatgcctgcactgatggaatacttgagcaagaacatcaaatatccggaagcagctatgaagaaaggtatacaaggacggggtatcgtgcaatttgttgtggagaaggatggaagtattaccaatgtaaaaatactgcgtggcgttgaccctgaattggacaaagaagccgtgcgcgtagtcagtgccatgcctaaatggaaacccggtacacaacgcggagaagcagtacgcgtaagatttacggtaccagtaatgttccgattgacagaagacaagatcccggtgaagtatgctcccattgaaaacaaaataaatgaactggtggtagtgggttatgctccggaaggtacaacggtaccggaggagggaaccatttttgaagttgtagaacaaatgcccgaatatcccggcggtatgcccgcaatgatggaattcatcagcaaaaacatcaaatatccggcagctgcacagcaagctaagattcagggaagagttaccatacagtttattgtaaatacagagggcaacatcatcaatcccagagttctccgcagtgccgaccctctgctggatgccgaagcaatccgcctgactaccattatgcctaagtggaagcccggcatgcaaagaggacaagctgtaaatgtaaaatatacagttcccatcatgttccgtctgcaagaaccggaaaagagtcctgctgttcagaacgccactgttactccaactaaataaactaattctctctccaaacaagtttaaatgaaaaagaagcagttacccggcgacgggcaattgctcctttttcataaaggaaatatccatgtttatttatgcacttccacaatccgtgtcggtgccatttccatatttctgcggtctacctggcggactacggcggcagccagttgcaggaacgcacgcccggtcaccgtattctcatccaaagcaaccggagtgcccttatcaccactctcacagatgctctgtacaataggtatctgccccagcaacggtacattcatctcttccgccaacctcttggctccttctttaccgaaaatatagtatttattctccggcagttcggcaggtgtaaaccaagccatattctctaccaaaccgagaataggcacattcactttgtcattggtgaacatattgatgcctttgcgtgcatctgccagcgccacagcctgcggcgtgctgacaacgatagcccccgtcagcgccaatgtctgcaccacagtcaagtgaatgtcactcgttccgggaggaaggtcaataaggaaataatccagttctccccagtcggcatcaccaatcaattgctttaaagcattgcttgccatacctccgcgccacaaggtggcctgatcgggatcgacaaagaaaccgatggaaagcagcttgataccatacttctctatcggaacaattaaatcacgtccaccaatgttctccgccaccggacgggcatcttccacttggaacatcttaggaacggaaggtccgaagatatcagcatccagcagacccaccttataacccaactttgccaaagacacggcaaggttggcagcaaccgtggacttgcctaccccaccttttccggaagacactccgataacattcttcacctgaggtaatagcttacccacttccggacgtgccgcctgacggctttcagtcgtaatcacaacctccacctcgggagaaacatacgtatgtacagccgtctcggcagctttcaccatcgacttcatgaaaggatcggtcggtttctcaaatgtcagcgagaagctgaccttcatcccttcaatccgcatgttatcggccaccatctcagcctcaacaagattctttccagtgccgggataacgcactgttgccaatgcatcaaggattaattttggatataatgtcattgtatttactatttgacgatttactatttactatttttatgcgaatcagcagtagttttaaccactgattcacatcatttactggtttgcagtccactacgcttgctacggttataactgcgatactcatccagctctatctccacatccggctcctgcaactcaccctcttgcggaagatggaacttgatgtacttgatattcaaaccacgatccagccattgttgttcataataggtcttgatgctgagtatctcatcagccatgccggagtgatataagtcttccgtcatcacatccaccggcaaccggtttctttcaatcatgtaccgggtataggtaaacatgaagttgctgtccgtcttcagatgaacgataccgtcattcttcaggaacttgcggtagcgctccatgaaataagtggaagtaagccttttggtagccttcttcatctgcgggtccgagaaagtaagccagatctcactcacttcatccgaagcaaaaaaacggtcgatgatttcgatattcgtacgcagaaaggccacattcttcatgcccgattgcagcgactcggtagctcccgtccacatacgagctccctttatatccactccgatgaagttcttgtcgggaaacatgcgtcccaatccgacagtatattctcccctaccacagcccagttccaggacaataggatggtcatctttgaaaaactgcccgtgccaatttcctttcatgtcaaacggcacattatctaccgcggaatacggatactcgaaaacatgcggataactcgccatatcggcaaacttctctaacttgttttttcccatttaagaagtattgaaacataaaacatattattttaagcacggattgcacggattttcacggtttctcttaaatctatccgtgttttccgcgcaatccgtgcctaaaagtataaaaacaaagtcccggcaagtcttatacgatagacattaccgtattattcaacgatcgttacccaaccatgagtatctggctcgtcaccatactggatggcacgcagcttgttgtaaagcttcgtacataccggtcccggttttccatctttggaaataacgtatgacttgccgttctctacgtcgtcaatacgttcgatggggctgataacggcagctgtaccgcaggcacccgcttcctcgaaagtcagcaattcttcttcaggaaccggacgacgctctaccttcatacccatatcctctgccagctgcatcaggctcttgttggtgatggagggcaagatggaagtagatttcggagtgatatacgtattgtccttgataccaaagaagttggcagcaccacattcgtccatgtatttcttttccttggcatccagatagaactcgcaggcataacccaaatcgtgcgctttcttgttggcacgcaaactggctgcatagttaccacctactttataagtaccggtacccaatggagcagcacggtcgaattcgcggataatgacatacggattggttgagaatccacccttaaagtaaggacctaccggggtcacgaacaccacaaacagatattcgctggcaggatgtacgcctacttgtgcaccggtacccaccagcaacggacggatatacagagaagcacccgattcataaggcggaatgaaacgctcgttcagcttcaccaccttcagaatagcttctttgaaacgctctgtagaaagttccggcatcaagatgccacggcaagtggattgcaggcgggctgcattctcttccaaacggaagatacgcactttaccgtctttgccacggaaagccttcaaaccctcaaacgcttcctgaccgtagtgcaaacaagtggcagccatatgcataggaatggtttcctcactgcaaacttccagttcgccccattgttcgttacgatagtaaattctcacattgtaatctgtcttcatgtatccgaacggcagattagcccaatcaagttctttcatatctcaaagtattagttacttctattacgtacattttgcaacaaaaatagcttttattcttcagattcccgcttctccgacagtaatttttcaatttccttatcagctttggtcaatttatcgctgcaaaatgctataattccatttgcttcctttattttttcagcaagcacatctatctccagttcattgttgtctatctggctgacaattttctccaaacgtgccatggcttcggagtaggtttcttttttcttggacaccatattatttacgatttgacggtttacgatttacgattgaggttacttctcctttttggagcagggtggtgatttcatctccttcattcagcaagccgacatttttcacaaccttcccgtctttcaacgtgatgctgtaaccgcgggcaagcagcttttccggtgaaacatccaccaagcgctgctgcaacaattccagacggtggcgatggcgggacaaataggaagtgacagcttgcactacatctttccgcgcagtcagtaaagctatttttgcatcggatatgcaacggtatgaagcagaaggaatccggttcttgcaaacagacaacttgcgctgttcctgctgcaacagattcctgaccccctcatgcaagcgggaaacaagcatttccagttcatcggcggcattgttcatgaggtctatcaagaactcggcggcggccgtaggggtctttacacgggtatgtgccacagaatccagcaccgtgtcgtcccgctcgtgaccgatacccgttatgataggtaacggaaactgtgcacaagcagcagcaagcagataggtatcgaaaccggacaagtcggacgtggcgcctccaccgcgaataatggcaaccacatcaaactcggacaagcgtgcattcacccggtcgagagcagaaaggacagactcctctacacggtcaccctgcatcaaggcaggaaacagctccgtataaaagtagaacccccgggaattgttttccagctgatgacagaagtcaccatagcccgccgccgtcggtgaagatatgacggcaatacgttgcggcaggcggggtatatccagttctttattaagagtgaggactccctcctcctcaagctgcctcaatatttccctgcggcgacgcgccatatcgcccaacgtataggtgggatctatgtcctgcactgtcaaactatatccataaagttcgtggaaactgacagtgacctgaaccagcactttgatgcccgaaacaaatgcctgccccgtagcctcctcaaaatagggcttcagcaaccgaaacacatttgcccagatggtgcctctcgccttagctaccagactattgctacggggatctttctgcacaaattccagatagcaatgccctgtactgttggtacgcacatcgctcaactctgcctgcacccaaaactcatcggggagacactgctccagactacggcgcacaagggcattcaactcttgtaaagacaaggcttccatacagctatcattcaaccagttataactttataaaattttatccgtaataaagcggtactttattcgtgataaagtgacaatacactattggcaagccaacagaaattctcgttatttgtttctttcggactgataatcctgatacgccttccacatatcgggcacgccatagccatagatattatcaggataatccgtacggtcaccggaacggcgcaccaactctatcacttcttttgccgtaagttcgggacaagcctgccacaagcaagccaccataccgcacataatgggtgaggcaaaagaggtaccgttcgcccttccctggttgccgtccgtacgtataacgtcggcacccagcccgacggctacaacatccggctttatccgatggtctgccgtattccctacagacgagaaaggagccagaacagcttccttgtcgacagcacccaccgtcagcacattttcggcatcgcccggaggcgtaatcttcttccaagaaccggtgcccgaatttccggcactgcataccaataccatgcccttatcggctatgcgcgatgcctgacgtgacatcagcgcatagtgcccatccagattgcggagcttataattcttggatttatcatcgaaagcgtaatatcccaatgaagtattaagcacatccactcccacgctatcggcatattccacagcagcagcccagtagtcctgctctaccagatgctcggagtattcgtcttcgctacgcagcaaccagaaagaagcttcgggagctgtaccggtcatgacaccggggcgattcatggcgatgcacgagagcaccgccatgccgtggctgctttcggcaaatatatccgattggggattcacaaaatccttcgtacccaggatgcggatattctgcatggcggttatcttgtcggcattgtggaaacccgcgtcgataacggcaatcgtcattccttgtcccttgaagccttcttcgtgcagcttatcgccattgctcagccgtatctggtcgacagccaatccataaatgctgtcgggatgcacgctcgggcggtttatcagagagtcgcgctctgtcgccatgaacggcccgtcacctccgggagctatccagaccttttccgtcttccgaacaaaaggcagggcggcaatacgctctatcaatgcagagtcgttgcaggacactgtaacaaaattctcccatttgccggtaacgacaatcttcgcgccttgcctgcgaatctcatccacatacttacggcataccggaaggtctgtcgagtctatcggaagattctgcttccggcgacgctcaatcgccttttcagaaaggaacgcttccggatgttccagcgaatacgtggtggcagccttatccttcaggctgatacgatacttcaaagtatcttgttgtgccgatgctcccgccgcaaacaggacaaaggctgaaagaagtacaagtcttttcacaattagaaattataaattaaaaattaaagaaacatcccgatgccccgttgggaagcgatgaatgagcctccaaccacacgccggccgacatagaacacggcagactgtcctggagcaatggcagaagcctccgacaagaagtgcaccagcagacgcccgtcctccaggcgcttcacggtgcaaggaataggtttgctgcgataacggatgcgcacggtgagttcttccgatccaaagaattcgtcttcatccgtcagattctcctcttcggccagcatatatccggccttcaattgttccgcatcgcccagcatcacggtattcttctgcggattaattttcagcacataggcaggtttgcccaaagctatctccaggcctttcctctgtccgatagtgtagtaaggaaatcctttgtgctcccccagtttgacgccttccgaattgacaaaccatcccggccccacttcactgtctatctccgaggaatgctcgcgcaagaagtcgcggtagtctcccttgatgaaacagacttccatgctttccccttcttccgccttgagcgtatatcctttatcacgaagatactcgcgaacctgcatcttggtgaatgctcccaacgggaagatgcatcgcttcaacacctcctgccccagtcgccagaggaaataggactggtctttcttatcatcatccccggcaacaatgtaaaccttcccgttccgttcctccagacgggtgtagtgcccggtagcaatgaacgcacaccccaacctgtccgcccactccgtcaggatacggaacttgaataacggattacacatcacacaaggattgggagtacgcccccgacgatattcatcgataaagttctgaacaataatctgccggaaagcctcacgctcatctgccacatggtgttcaattcccatactgtcggcaaggttgcgggcttccaccggttcgtctccccacacccacatggtgaggccgactatctcatagccctgttccctcaacatcaggcaagtggcggtactgtctatacctccgctcattcccactaatactcgcttttcggatttgttcatattctgccattcattcatataatctgcaaaagtacacgttttcaagcagaatacacagcttttcagctaaagagagagtattttcatcctccacagccttcaccttcttcctcaaccttcctattcatcggcttttccggtaagacctctttccttcgcactaccgcacctcataggtgttccggcgttttcttatcaattacgcatctgtctttgattacacctcctttcctcttagcataaccatttatgaatcagcagataatcagtgcaaaaagaatgcaaccattttgcagtgacgctacgcccctactacagtgaggttagcagcaggcaattgacagctcccgagccttcaacgggaaagcgaatacaaggtttttacccgataatccatttactgcccggtatcaacgagatgagcttggttgccacgaaacaactgataaacgtacataccgctataaccggaatggcagccacagtgggcaatcccaatgtagacttaaacaccgacacccacaagccaagccagaaaatgtgcataagaaacatgccgtagctgagtttagacatttcggcaatgatgcgcggaggctgcggaatgctgatacagccgaacaacaaaaatgtgcctgccgtcaacgccacgcaattaagggtacagaaagcccatcccacctcaatgaccggtgtagaatgaaccactcctggaacagcctggacatagaacgaccatatggtagccgccgcgccgaccagcataagcaagaaaccgacccgcagacgcaaggagcgcccccaagtaagatgcacgcggatataatgtgccagcacaagatagcctaaataacccgaaaaataccataacatgtgatattcgttccagaaacactgtccccatacttcaccaaaccaacggttgaggaaaggtatacaagtagaaatcagaaacagtccgatgaagaaacgttcttctttagccgaaaccttctccagccacggtgaaatgaccggaatgaacagataaagacttatcaacggatacataaaccagaagtgcccggcaagcgcaggaaagttcagccagatacgtgaaaggtcgttcagagattgttcgccatctatctgtccccacaacatgggcaacgtgctatatagtaccatgaaaaagacgaacggtggcatgatgcgcaggaaacgtttgcggtaaaactgccaacagctctgtcctttcttcatcggtgcaagcaggtaagccgaaacaatcatgaacagaggcacagacatacgagagaaaccatcataaactgatacccacaacctatcggcctcattctgaaggaaagactgcggtcctaccatatctgtagagccggcagctccataaaaattctcactggcatgaaccaacatgaccaagaagcacgcaaacacgcgcacgtaatccaaaaaagcaatacgtttcattttattttaagttttctatttatgcaagtcaggagttaaagatgtcagcacttcactactgtccgcatcattcatcaatttattctcttgtattcgggaacgcagatatccttaaccgcgcagctcccatagggatgagtgtgatttcttctttgtcgcctctcgctgcatcctcttcgggcaacacgccacacaacccggtttcatctatttcccattcgggaaccaatcggccgacagccttcacctccaaaggtacattggccaccgtaaaagggtagtcgtcggccggccatgatttacggattacctcgaagtgtttcaagggttctgtcttgtccaacaccagcgaataattccacgcgctgccgggatatatctcagtagtgggccatttttgagggtcagcatctttttgccatttagaatcaccgatggccgtttcgcggctgtctttctctacatatttctctgcaatcttaagagagagcgtgagaggaccgtaatccacacttacgctgtttttattgacctgccaggtgcgcatggacaaagacatcggaaacgtcaattccacacagtcaccatccgaccactcgcgatggatgcagagatacttccctgccacgggaaccgcatccacttcctcaccattcacgcacactttcgccttttgagtccatgaagggattcggaaatagaacgggaagacgacttttccctcggtagagacagaaaaacggatgtcttcctcaaaaggataattcgtctcttcgtgcaaagtgatttcctttccatcagctactttcaccacagctttgcaagctgcataaagagccgttgccactccattgtcgggagttgccaaaaccagatgctcggcaaagtagggccagccttgtgcatgattgtgctgacagcaacgactgctgaaaggattcatcgaaagaaacggtccgcggttgtcaatgcccggatgatgattcttggaatcactgacgacatggttcgggcaagtgatgtagcgcaacgctttaaaatccggcatcacggcaaccggataagagttaaatgcaacttcttcgcaatgctcggcccataagggatcgcccgttatgcgaagcataatttcatcagaagccatctgctcaaccagcccgcaggtttccaccccttggcgggggtcgatatatcccaaacgggcattctcatctgccccgaacatgccaccgggcacttgcccgaaagtacgacgaatcagtcgatggacattataagaggctttcagcatggcagaatcaccggtctgcatataataagtagcaggctcacggaaacattgggcaatgtttacgttgtgccagttgggcaaagaggtcgactgagtccagtccgcagtattgcgatgaatcttttcggccaattcgagcaaaaaagcatctcccgtatgactgtaaagccagtaaatgctgatgatattatcgcctccacgactattctcccaaaagtcttccagaagttggtcgtcgggaaccgtcatctgccatttaaagtagtttgtcatcagggctatgacacgctggtcttgagaatactcgtaataagattgcaggcaccagagcataatcatctgtgcccaaagttcgcgttttccattgcgttcgttgaccgggccgaaataaccgtccggctggcgactggcaaatacgccttcgatccagtatttggtttcttctatcatcttcggatcattcagaatatatgccaaactgctataccctttgagccaatagggaacttcctcccaaccatggtccccaccggtcgtaagccaagcgttgtcatccttttccaaccaagcactgatttcccctaaatgtccggtcaggccgtcgcgctgcaactccagaaatttccttacccacccctcgggacggatgctgcctactggcaattttataaagttcaatggacgaagcggggcacggtaacccatataattagtattgacagcatgtatatccggccggtcaaccaccgtcaccgtaccagcagaagaggcagaagtacaagccataaccgaaattgccaatgccacgaaaaggaaggcagccacccatgtatataagttcttcatgttatatcttaatcaatgctattcaataaatccaccttcccttcattaaccaacttcaatatcaactcaccgaaaagggtgttctgccaagcaaaccaagggcgggtgaagttagttgcatcatccttatggaacgactcgtgcatgaagcccgtaccggcatccgtatccatcagcatcttgatgcaagttttgatttcggcatcatcccggcttgtgaaagctttcatcataatgctcataggccacaccatgtcatagccgatatgcggtccgccgataccctcaccggctttgccgctgaagaaataaggattgctgtcgctccacacaaaacggcgggtattctgataaatagggtcattgacgtctacatctcccagatagggcatggcaagcaagctaggcacattggcatcgtccatcagcaaatgattaccgaaaccatcaacctcgaaagcataaatggtaccaaattcaggatgattgtaggttgcatagcgtttcaaagccatttccacctcatcggccaaggcacggcaatcggcagccaaagcagtctccttgttcactgtttccagaatctcggcagccttacgcaaggaagtgacagcaaagaagttggaaggcacaaggaactgaagcgttgtggcatcgtccgacgggcggaagcaggacacgataagtcccaccggacggacaggagcacccagaccatcattgttcagcgtatcgagcgcacgctccgtcttgcgttgaaatttgtagggaccggcaccctctttgcgctgctgctgacaaaaagtagtataaatattgcggatggcttccagccattcagcaccgaaaaccgaagtgtcacccgtcacctgccagtagtgataagccaaccgtaaaggataacaaagcgagtcgatttcccatttacgttcatgcagttcgggcttcatgtcagtaaggtcactcatccaatgcccatcgggtagcgcaccatcgttgtaagcattcgcatatgggtcgatattgatacatttgaactggcgtagaataacaccggccagcatctctttcagtttcgggtcgttattggcaagctgtacatatggccatacttgcgcccctgagtcacgcaaccacatagcatggatgtcacccgtatatacaaaagtatcaggctttccatcgctgcccttgcggaagtgcacagtagtatccagcgtatttggaaaacagttggcaaacatccaggaaagcttgcggttcttcaaaagtttctgtacacggacaatctctttctccacggcagtggaacggaaaagtcgttgtttctctttaggacggttagaggtatagttaccagcagatgccgtattatcctgcacggctacaaagcccgcatcggcaagaaggcagctactattgacagcctgaaccatcccggcagccgcagccagaacaagactgaaacaaatctttttggaattaagactcatatttcttctatataaattcgaattgaaaattgctattagtcaagtggaggggtggtagctttcactccctcgaaagtcatgcgcaccggctttatctttccttttttgtcaaagtacatccggtcaatgcaggtggcacggctgtttgctgccgtttctcccaacgggcgacggtggtaaatgatgtaccattcgtccttaccttttccacgcaccactgaatgatgtccggcaccggtagccacatcggcatcctgctgaagaatgattccctcgcgatggaacggcccgaaaggagagtcggcaatggcataggtcacacggtagtcgggacttccccaaccgccttccgaccacatgaagtaatactttccgttacgtttcaacatgaaaggaccttccacatagtcctgaggagtcacttctttatagactgtgccatcatcaaaaggaacgacactaagtaaatcggaagacagtttcacgatgttgcaatgcccccatccgccatagtacatatagtaagtgccatcgtcatcacggaacacaaactggtcgatgggctgtgcgccattcacaattttatcaatcaggggcttgcccagcacatctttgaaaggacctgccggattgtctgccacagccacaccgatgccgccaatctcagagttgttctgtatatcgttccctccgaagaaaagataatagcggtcattggcctcgataacagccggcgcccacaaagcacggcgcaaccatgggatattttcctttgaaagcacgcgtggatgtttggtccaatgcaccaagtcgggcgaagaataggcatccataaaagtctgttcatcataaggagcggaatatgtaggataaatccagaacttcccgtccagcactactccctcagggtcggcataccaaccgggaaaaatcggattgccgctacgtttcttttgaacttcttcaccagattgcgcataaacggaagaagaggagcaaaacaatgccaagcagtaaatagtaagtttcttaagtttcatggtaaatagggttttcaaacagtgatttatcgtaaaagagagagggtgtgtcaaaacatttttcagctatcactccgtcagacattcggcacaccctcatcattaattgctatggttttggctttgaggtcacttcttctttttaagcgttttcgagaaggagtaaggagcatcctcctctcctgtcccacgcagtttgttgggcacattgtccatagtgaagcgcagtgaggagccgttcgtcagttgctcgtgtgtcagaaagttgcgtgtatagtcaacgccatccactgtaagtttctgcacgtagcagttggcacgactattctcaggagcttcaatcgtcacagtcttgccattttccaagtgcagacgcacagaacggaaaagaggagcacccagcacatactggtctgtacccggacagacgggatagaatcccaaagctgaaaacacgtaccaagcagatgtctggccgttgtcctcatcaccgcaatagccgtcgggattggcattgtacatacgctccataacctcacgcagccagtactgcgccttccacggctgggaggaataattatagaggtaaatcatgtgctgtataggctggttgccgtgagcgtagttacccatattcatgatctgcatctcccgaatttcgtggatgacactaccataataactttcgtcgaacacaggcggcaacacaaacacggaatccatcatctggttgaagaagtccttgccacccatcaggtcaatgagtccttgcggatcgtgaaaaaccgaccatgaataatgccaactgtttccttcggtgaaggcgtcaccccacttcaagggattgaacggcgattggaatgtaccgtcttcattcttgccgcgcatcaacttatgggcagggtcgaaaagattccggtagttcagcgcgcgtttggcaaaaggagccagttctttcttcgacttgccgagcgaaagtcccagctggtagatgcaccaatcgtcataggcatactccagcgtacgggctgcattctcgttgattcccacattataaggcacgtaacccagcttattgtaatactcatgtcccaaacgtccggtagaggaaacctcgggatgcactttctccgtaccgttcttcacagcttcccataatgtctcgatgtcgtagccgcgcagtcccttcagccaagcatctgccaccacagaggcagaattgttgcccaccatgcacccacggtgtcccggactggcccattcgggcaggaaaccgctctccttgtaagtattggccaacccttcctgcatcttggcattcatggatggatacatcagattaaggaaagggaaaagacaacggaaagtgtcccagaaaccggtgtcggtaaacatatagccgggcagcacctcaccattataggggctgtagtgcattacctgaccttgcgcatctatctcgtagaaactgcgcgggaaaagcaccgaacggtagaaacaagagtagaaagtacgcagacggtcgaggtcggtatcctgcacttcaatgcggcccagtacccggttccattcgtcacgcccggctttcgccacctcttcaagcgtccggtcacccagttccttcaagttcaactcggcctgctcgtgactgatgaatgaggaagccacacgtacattcacctgctcgccacggagggtatgaaaacctatgatgccaccggcatgattggcacctgcctcggtggtacggggggcaatctttccgtccttcacggcagcagtataagtaaaaggcttatcgaactgcaatacaaaatagttcttgaaattgcttggcacaccaccactgttcttggtggtgtagcctatgattttcttttcagccggaatgattttcacaaaagagccattgtccatggcatcgatcaccacataggcttcctccgtttcagggaaagtgaaacggaaggcagcggcacgctcggtaggagcaaattccgccgtcacatcatggtcggcaagatagactttataataataaggagtggcagtctcggctttatgagaaaaccaactggcacgctcgtcctggtcgaaagccacctttccggtgataggcataatggcaaactgtccgtaatcgttaatccacggactgggctggtgtgtctgcttgaatccgcgaatcttgtcggcatcataagtataagcccatccatcccccatagtaccggtctgtggtgtccagaaattcataccccaaggcattgccacagcaggataagtgttgcccgtagaaagggcatgcttggattgcgtgccaaccaaggtgctgacgtaatcaacaggagtaatcggctcgtcaaccggcagtaaggccgcctgcataccgcctacaagaaggagggcggttccccatgcaaaaagtcttttcattcgtttaatagattttgtcattgtttatttccaatcagcttgccttcaagcattttcatgtaatatccgcctactaccgagcgggccttgaagccacgccagttgggcttgtcggtaaacacccagtcggacataggcacgcggtctatcgtttcgttcatgaacttatgcagggggacgatgaattcacggaaagtggccaggtcaggagccattgtagcagtccacatgatccagtcggtcttggtataagtctcacgactgtccagaggcaaaccataaatattctgcttcgtcagataataaggtatctccatttctacaatttttgtgtcaaagatgtccagtccgagcaatttatcccagacaaggttgtacttctggctccaggtacccggcttgtcaaaggtcagacgataatggtcaccgtcgttggccatacgttcccactcagccgccatctgacgggccttcattgtatagctttcggcaacatccttcttaccgagcatttcggccaaccggccataagaggccacccctaaaattgccttgatggaaagattcgtgttatgggcaaagtgtccggcgaagtcatcggtacagagctggttctcaggatcgagtcccttttccaccagatagtcggtccaggtggtgagcacttcccaatgtttggccgcatagccggcatcgccctctacggcagcaatggcagccgtaagaatcagcatgtttccactctcctcaaccggcatatcgcctccgtaaacctgtccgttggcaagaggataggtacccaaatcatgggcggcgaagggcttggtccatttgccgctttcactataatggaagataccgttcatcatgcctttctccagttcaggattatagatcagatagaggggagccgaggggtaggtcaggtccaccgtattgatacagccgttactgttgttttccttcgacagccacaaaaggtcaccgttgggggcttccaccagcttgtgggcggcaatggactgacggtaggccaacgcgcagagttcggcatattccttgccgcctacggcagaagcatcctccattaactttttatcgaaggcatagcagcgtgccagcaactcgtcatactcattgtaggcggccagcatttccgactcgatggtacggtcgcctttcgagttccagtaaggacgcaagtttgtaccgaagtattggatggaatagatgtcgtcatatcccagcataatcttgtcggtaaccttcctcactttaccatagtcacgcaccaaggccatattcccgttgctgtcctcacccgcaagcgaagctgaattaaaggtgccgttcacgaagttcttgcgcagttcggtactgttgccgatgctgtatgctgtgttttctttaccggaaaccatgtagaaatatccccagtcaatgcgaaggtcatcgccctgcttagccaggatattctgctctttgcttccgctcttcaagtaaagcagcccgtcagcttcatatccctcgcttgcagattgctggtaaggctggtcgagcgcccagcgcggcgaggcctcaaagtacacctccacatcgtgttccttgccgtcacgggcagcaacactgtaagtaaggtaattcacggggcggctcaacagcttcaggtcttccatgaaaagaggtgccgtgaaagtgactttcaagtcgacatcaccacaggtaaaagcgtagtgtgtctgcatgggctgcacgtcggcagaggtctgcacggctgtgttgccaaacacggtttcctgatgtttcggaatctgcaggccgaagtcgagcagaccgttgccgaccggattgatacactcggcggcaatgatgttgtctccttgtttcaaagcagccaaagcctcatcggaaagtttcacgactttgttcttattgcatgtggttcccgtactgtgtatcttcactccgttgatatagaatacggcatcatcatcattggagaattccagatagacaggtatgccggtcaaatcgcggtcgatatttaccgtacggcgcacccaaatattgcgggtcccccattgggtcttggctgtaggctcattttctttggtaccaaaggcaccacggtccgacttccatccggaatcattgtaatcggcagatgtccagtcgccagcgggcttgtctgtgatataccgtccagtccagtccccttgctgagaggtgggcacgattgcattcatctccaattcttcagtccccataaaacggtaggaaacaccgtctaccttcaccacgccaatcagagggaaatccttacccgtccaatggcgaacggggctgtcataaaggttatcgctcatggaccatgcactggcataagggtcgatggtaacaagcgggtaggctggagctctcaagtcattcttgacgacttcataagacgtatccttgtcactgcacgcaaaaaggcatgatgccaacaaggggtataaaagcttttttctcatatcgtttatataatataattgtttatgttgttaaatgctaaaaaataaaaggtctgagattaccagcaaaacttcaccgacactccgtcaggattattctcaaactctatcaaataggtatgacttgctgcatgccaacgcttggtatcgaatacttctttgccatcgactgtcacactcttaggacaactcggcaacagtacccgcgatacgtttgaagtctcggcaggacttttcgccacataggaataccagccttttccgcgttcttcctgttcttcgcgacttgccgaagccagcacttgaggcttcttcttaccggctacacgttctacattcagcaacaaggcttgctcacccggatttatccgcttggaagtgtatatcggtaatttgggatcaaaaaggtcaatcaaacatccttccacagtaaacggctcgtcgctcacactctcttcaagcacagcagccaagtcgtaatctcccctttgcagatagaagttgtttttgaactccagctttcccgctttcgcgttctgctcgtacatccgggccgcaagatacaaaaaatatttgtcaccaccctcatgcaggacataatctttaggatcggtacgaataacacatacagttcccttaccgtaactatattctccctgattcggccaggcaggaagccccatctgctcaaaaagatgtgcggaaggggtagcatagttatgcccgttggtattccaccattcccttacattctggaaagggtcgttgtccgttccactataaatcaatactccccctttcttcacccaatcggctatgtggctgtgcgcttcaggctcaagcggtttcatgttcgcataagtcatcaacaacacttttgtgtcagccagcgcttccttatagccgaggttctcaatgtggacggtcttgacgggtacccctcgtttgagcaaaggcaacgcctgaccgtagaaattcgccaattgtgggtcttcatatccgttgtgcgtagggaaacgctggaacatcaaggagtttgccatcagtacgctgaatcctttgcttccggtcagttctttatcagtcagaggcatacggttcaaggcattaatcatcacctgcatctgtgtggaatagaaacggggaatacgttctttcttgtcgctattggcacttgtccgatatagtccttcgtagatacgttccggccaaggcatcacttcgtaatcggctatattgggatagagtaattgtgcagtaaaggtagcctgatagtttttcttataatctgcccagtcacgcggccagtcttcgatagggtcggtcagaaagaacatcttgcgaccagtaggagcagtcattgactccatagagccatactccagataggcagtctcgaacacacgctcacgtttgcgaccgtcaaagaaattcggctcacgcgaagttccggtccacacctgagcaatgtaaccgtccacacaaggaagtgaggcaaggcttgcttctggactgacaatctgccattgcgaatagttcaccagcgagtgggtgggaacgtagcacttcacgtccatccctttgcttttaccatattctttggcaaaggtgaaaacttcattcagtgcacgatagtacaagtaatacttgagtttgctcgacaagtaagtattttccggagactcgtgttgcggtctccactcgaagccatagtattttttccattccttcttaaaagaatcactgtaaccggctcttgcccaaaattcaggctcttccatgaagatggcatccacaccggcgtcgattaccctcttcacatgtctctctttcagataacttaaaaaattctccgacggtacgatatagggcaccatgtgaccgtgccatatcgtatctccggtctgtgtgacttgtccctcatccaaatgccatttcccgtcccattgtccggtaaaatagtcctgatattcaccccaagcaataccggtcataaagtgtatgatatatccacgttctttccaggacttcacccgttcctcaaaagatagtttgcgtgatttatccgaaggatttccccctactccatacaccatcaccgcatcggccctattgtctatagaaggcttccactcgcgtgaggtttgaaaagtggttttaacattgtccttggtctgagcatctacagagatgcctattgccaagacagccaaacttatcaaaaaatgtttttgcttcatattggtttcttgtttttatggtattaatcattgtccttaccactataatggcaaaagattgctcaacagccgaggctttggcactatagcagcaaagcctcggctgtatgccatcaagctacggaataagtacttccaccggctcactgtagttccaacggcgtgtgccgctacctacaggtgtgtcgtagttaatacgtgcggcagcgcgtacaaacactttgcgacccgaaggtatactgccgttagactggacaataacttccttacccagtaaatcttcgaaactcttaccttcatagctgatgctgctcgaccaacgctcgtcgcgtgcccggtagcctactgtgtttgagtagctgacgaagaactggatgtcagttacattcaagtattcgtctttccaattgcccatcggctggattttttcacggaaaacttcatccgacacaccgcgtgtcacgcgtacttgtgccttgatgaccccattgctcacctgcggatcacctacaaactcaacgttcagaaagggctgtacttcaaatttcactttcgtcgtaccactgatttcagtattgacggaaccatcatggagcaaggtaccgtctgtattttcacgcactaatggaatgaacgggccgtcgatacggacattatactcacctttgaagagcttcgtgttctggaatgtaccgtccatcatacagtaaaaatcgggattatgttgcacattgtcaccccaactcaattcggtcagacggacacggataccctcactgccctggtcggtcaatacacgcttaccagttgcctcatctaccacttcgccccaaattgtttctgccggttcctcatagttgtctatttcgaacatgctgcatgaggttaacatgaacaaggcgctgaataagctataaaatattgtctttttcatacgttttaagttttttaattattgaattttatcgattaggctgctggtcaatcacaggactcttagaaacctcaccacccggaatcgagaaataatagtccaccggagtgtaaccgaagtccttgtcaccggcagtcgtatagttgaaacaaacatcaaagaaccacttgccggtcgccgtcgaatagaacggatagataccacggaaacgataacgagtcgtgttgctgaaacggtccttattgcgttgctcaccccaaaatccatcgcgaccttcatagtgattcacacgccagcgacgcaagtcccatttggtcttatgttcgaaggccaactccttgcgacgttccttgcggacgatatcacggctgtctgttgtaccagtcaacgaggcagtcaacaaccgggcaccggcacgctcacgaatatcattgatggctttcgttgccacactcaacatatctgtaccatcaggagaagagacgcccgctaacgaaagttccacagcagcctcggctgcattcagcagcacttcggcataacgcatcaaaataaaaggttgtgcactattgccttcccgaggaacaaatgcaggatcagggttcaaccatttacgtgccagcagaccggtcatagcacttccaccatcttcatagaaaggaccgttctggccagcagccttcatcgtagagccatcaggcagggttacaatttcctgctgatcttcaggtttcggactgagataaagcgttttgggcttctctttataagcactcagatgattgtacttggtagtggcagcaccatacgaatagtcactaagaagcggtttgacaggcgcggcccccgtataaacaccggcataaatttcaatttccttacccttaaacacatcaccagggaagatgacgtaagcacgcaatctaggttcagcattcttgtaatagtccatgggactatcatacataacgtaattaccttcggtacaagaattgcctgtcgtcaccttcagggtaccgtcgggataacggtcgaaaccatcaaacaactcaacaaagtcggctgtcgggcaaacaccacagttcagcggagccttaaaggtgagcggtaagttgtaagaatcgtaagcatgagtactggtggggtaaacgtactccttcacatagatgttctcaggattattgctaagatcggagaacatatccaccatattttgatattgtgcttccggatcattagcggcccatttcttcttgtaaagtgagtatacaccgcttttaatcacctcggaagcggctttgtaggcttcagtgaaatacttcttggaagcctcttgccagcggtcctcatcgaatccgatcacgcgtactcccgtcttggtacccaaaccggtcaaacgtccggttaccgtttcattatacttagctacactaccggcatagagcattgcttctgacttgaaagccaatgctacatacttattactgtaaccactcttggggctactagacatcatcaattcaatggccttgtcataatctgccaaaacctggttccatgtttcttcctcactggcacggggaacctccaaatttccgtctccaggatactggatgacttttgtcaccaaagggatacctccaaaacgacgggccatggcatagaaaactgtggcacgcacataataggcttcgcccaagtagtggttgtaagtaatttctgcataggaactctgatatttcggcaggttctcaagcaggaagttggcatcgcgcaacaattcaaaagccttgccccagtaagcattgtcttcaccggtaaacgcacagcaaataccgtccctgttcatggcttcaccagtaccgtcaatacccatggcattcaaccaaccattaaagttcaccccccattgtgagaggtatttaaagtcttcccatggcatattgctatacaaacgtgccatatagatgtccataccagactcattggaaagcaacgactcggaagtcacgatatttttgggagcaatatccatatcgacacatgaagtggcaagagtcatgcacaacatcgcggatatcagtttatgtctcatatttattattttttaggtttatatcattaattagaaagaaagggaaactcccaatgtataggtcttgttcaacggatacatgcgtcccaaatcatcatcgggatgctcagggtctacaaatttcacacccgtaaatgtcagcaggttgtaagcattggcataaatacgcagactggcattgggaatctgtttcaatttcgggaatgtataacccagctcgatactcttcagacgaaggtaagcggtgcttacacgattgaaagctgaattgtttttcgcccaacgacctgtgtaggcgtagtgaccggaagtccagacagtagaagggtcatagggatcggccttcgggtctacgggatgccagcgatcaagaaactgtgtcaatgcaccgccaccgttcttaccccaaatttcatgcaaaggctctttgtactccatagagcccagcgcagagccttgcaacagcatgttgaaatctaagttcttccattgcaagccggcatttaaactgaactgcaaccatggagtctggtcaaaggcaaacggatgttcgtcctgaccgttaatctcaccgtcaccattccagtcttcatatttgtagtcacccggcagaatgtcacgttccttgtagccaggatagctccaaatatcattccagctggtgtagcgtccggcagaagtataaccgaactgtactccctgataacggttcgtcaagttgtcattacgccaacggtcgtaggaattggcccaaggacctttttccgaagcagtcaggtatttctgacgggtaacggtagcaatacctttcagattataggccacttgtccaatcttgttgcggtgggtcaattccaattccataccgaattggcggtcactgtccaaattttcgcgcggagcagaagcacctaccaccgtaggcaaatcaccggtacggcgagcgaaacggccagtacgcagacgattaaaatagtcgaacgaaacacccagcagaccgttccaagcttcaaaatcgaaacccacgtcgaatgtcttcgacttgaaccaagtgatgttctcattaggtaatgccatcgggcttgctgcactgatgaatttgccaccgaagatatagcccggtgaataaccgttatagtcgccattagacatgttaccgctggttgcaggataagtgtaccccatagcccagtcataattcaagtcaccatcatcacccagcacaccgtagctggcacgcagcttcagctgattgacaaacttcaaagcatctatgcttttgaagaaaggttcttcggatactctccacccagccgatactgaagggaagaaaccccattgatgccccttggcaaacttgctggaaccgtcgtaacgaaactgtgcttccagcaggtatcggtcggcaaacgaatagttgacacgacctatcaaagcttcgttagcttgttcatacaaatcattattaccagtctgcatggcgccgatctgtccttcagtcacaccagccagcaggtaaggcatagagaatgccaggtcgcggacagcgtagaagttgtcaccgttgcgcttctgtacctcccaaccgacaacaccacccacatggtggacatcgttaaaagtgcggtcgtagttcactgtgaattgtcccaacatctgtgatttgtcatagaactcgcgacgcatgttgctgggcgaactttcgttataaaccttctgattgtaggtaccggtctgctcgtcataagcatactggtagtactctttgcggaaagcctcgttgttgtcagcacgataatcgtaactgaacatagctttggcagtcaatcccttcaataccggtgtgtattcacagaaatctaccgtcaaagtagccgaggactggaaatatttctgcttgtacttcttgtaaccggaaatatcggccgtcatcatagccacagtattctgttccatgtccaaaccgttgtagttcaacatcgtcccttcaggatcagcgtatgcaggataaagtacaccttggcgccaatagttacgaatgatatcctgtgcgctgctgtaaggcgtattgcgttcgtcggagatgccacttacaccaagttcgaattttatacctttagcaacttcagttgaaatgttggaacgcaggttgaacttattataattcaagtctcccgaacggaagataccttcctggtaaaagtagcccatactgatatagaacttcgtcttctcgttgccaccggaaatgctgatgtcgtgttgtgtctgtggagccacattagagataatcaagtcattccagtccgtcgtacggcgcgtaccgttacggaatgcttcaaagctctcttcgctgaagacccatgaaccgccattgatgttattcatcgacatttcgttgaacagcgtcatagattcataaggatcacacagttcaggcatacgtgaaggttgttggaaagtgtaggaaccattgtaagagaattccgtttttccagctcctccttttttggtggtcaccaatactacaccattggctgcacgtacaccgtaaatagcggcagaagcatctttcaacacagaaatatcatcgatatccattgcattcaaacgctggaattcttccgtactccgaggaattccatcgatgataatcaatggagatcccatacctcgaatatcgaaactgttattgaaagttccgggctcagaactcttctgccatacgcgcaaaccaggaatacgtcctgtcagcatattctgcggattttcgttcttggtttttatcatatcctgccctttgacggcagaaacggcacccgtcaccgatccgcggcgttgtgttccgtaacctatcaccactacttcgtctatcatcttggagtcagtctgcataatgatgttgatagtggtacgtccgttcactttctcttccttgtccttcaatcccacataagagaaactgagaataccatctgcaggagtactgatggtgtaacgtccgtcaatgtcggtaatgacacctatagtggtgcccttcaccataacggcagcgccaatgacaggttcattggtgtcatccataactattcctgaaacggaaatagagttttgtgcgaaaacacctgccggaatcagcatcagaaggaatgccattaccacgcaggataatccttgtcgcatcttgctaaaattcttcatagtccattaattttaaaattatttcttgctccattcataattcgccaacactgcatattcggcggcaaaagcaaaagtgaacattccttccacgttgttcttgttcttttcagctttgtaccaccccaccagcagattggtgggaagcatatgtttgtattgatagttttcgtaggcataatccagattattctggaatgcctcgatacagcttgcggcagcagtgtgggttgaataagcatccacatacccacgcatcagtacaccgttgaaccagttgcagaatccgctgacatcaaatgtataacagcccggtttggcagcttcaggtttggcaaagtaagcaaaactattatcggtcaattccgccaagtccgtctgataagtcgcatcgcttgtaactctgaaaaggtcggcagcaccggaaagcatcgtaccactattgtaagtgatggccggacctacacgatcacgcagtttggaaccagtccggtagcgttcaccatcaatggtaacatattttatgtccggtgaatcataaccacccatcatatcgtcgtacaccccgtctggtctcagcaaatgtttcttctgccaatcgtaaacagctttggcaaaattcaagtaatagtcagatttcttctcagtgcgtagcttgcgactgttgtcggcagccacgtagccataggtcacttcgtcaggttttcctttgtaaatttcgtgcagccacaccagaggactgacaatagggccattactgcaagagtgcttggtgatataccccggtccccatgtgatgcctcccaatggactaccttgctcatcaagggtgcagtcccaaccgtcaagcacgtattcagtcaggtattctgccttttccagatagcgctgttcaccagtaatatgataggattccaacagttcacgcaccagccacatctggtcatcgtaaacattgagggtaccttccacttgtgcagctcccttgccgttgccgcggtttacgccgtataccgtccactgtttggtctgcgtataagaggtcagcgtaaaagtacctgcataaaactccagattgtcataaagttgagctaaaagttccttgtagcggttaaagtgagagtcataaagaaccgtctctccctttgtcttcccggtcttcatggctttcatcgcagcattcacggcctcaatggagctagtgtacatccacacactgcccaactcactggaacggtttccggtataagggttataataacgtgacatagccatgcccgtacccgtaaaatagcactctacagcattgtcaatcagctctatggcacgtgccacattctgcaccggcagattgcctggaacatacgtacctccgttgtccggcttttcatcaacagcagaatcattactgcaagccactaacgtcaataagagcaaagtcaataaagtaaataaatttttcattatattcatacaattagtttcttcagtccccgtctctcccctcacaagatgcaaaaggagataaagagggaaaaacaaaaaaattaaatatcagcagtttgtcaccccattgtgatgtcacgcagcaccagtttgttctcgtcgccgttctcttctcccttaaagacaccaatagtcaacattacatcttctccgttgaactgagacaaatcatagacaaaatcggcatatgcctccggatccccctttcctccggcctgatggataaatttccagcaaccgtcggcagcagcctcagcaaactgagccgtatgggatgcaggtgccaagtgtacgacagttccgtccatacggatagctgtcaccttgaagaaggtagcattcgttccactgaagttgcgagtcttcaacgtcatcctatcacacccagacgcaatggagaatttggcatagaaataagattcgggaacggtggtacttacgttgtttccactacgtgtctttatcagatagccttcggaagggaatacctcaggatctttactgagcggcatatacgaccactcggcacaaatatggtccgcctcgcgccatgcacgataggcgtccacatagttatcgcgatttccctcaaccggactcaagccagtgaacttcgacttcatttgcggcatggtagagcgtaccatttcccgggtcatctcccaaccatccaactcttcgaccgatgttccgggcaaccagccccatccttcaacggcttctttagcaaaagcgatgcggcgcaataccaactgcttccagtaatcaccagtctgggcacggaatgtaccgatggcaatgattacttccttaccgatgtatttgctcaagtctaccggaacagaagtgtaattttccgaggcataggttctgacatcacccaccatctcagccttcggatcggtagcagtcaggtctaccacctgcacgccataatataccggagcagcttcatcggcactgtgcgtacggatctggagggtcatcatgtagttatcttctgtaatcagcttgcttccgaatacaaaggaatcgaacatctccaagtcagcaggattcttgcgttcctcttcattgttacgaatgcggagagtggttccttcgttctgctcttcccagtcgccacggaagtccatcgtacacatgtagttgcaagcccaatcccagtggggatagctttcagcgtttcgtccgccacggtattcgttataataccatttttctgcagctttcaaatcatcaagagttagtccgcgcaatatttctgtcccacccatgcgaacctctatagcggcaatgccatccacaaagtcagctatagctaccttcttcgcaatggaagcatagcctgctttggtaaaagtaacggtgtagtctgccaatggcaaattaccaatttcaaatgtaccgtcgcttccggtggtggcagtctgtgtggaactgatgctgaccatcactccttccaacggagtatttccctttcctgcatcaactacttttcctttgatttttgcggctgcatactccattttagggctaacttcagccacttgttcttcattgaattttcctgccacaacggtaacacttaccgtctggtaatcggctttcgtaaatgtaattatatgtgtacctattgaaatattttcgagtgtatatacaccctgcgaatttgtcgtggtctgaggaccgtccggtgcagccgttataccggaaccatcgactaaaactgtgaccccttcaagaggggaagataaatcatccgtgacgacacccgtcacctttccataagataaagcccttccgcccgtatcatcgtccgaacaagagctcgccatgatgaccatacttataagcatggccatcagtccaaaaactttcagctttttcaactgtttcatagcttaaattattaattagaagttaatataacaaaggagccgatgccaatcgcccacatcagcttcagggtgttgcaaaccgcccccttatttgcaaaattgattccacatgggttaattttagggttaatttgggtataatggcataaaaaaaacattaatccagatcattttaacccataaaagaaagtacagacttcgcctaacactttaagccacaaaagtagtgccgcgaataaaacaattatcgtataagtcctactaaatctttattttcaacagcccatttgtcttcatttaccatattgaattcatcgattttgggagcctaattatcagaggagaaataatgggctatctcagtatacgactgagatagcctacatatgtgcctaaacttaaaaatattttataaatacttttcaattgcatataagaacaacaacaagaacttcaggaaagcagacagaaaaataaaagaaaaagcaaagacaaaaaataccggatgcagcataccgggaaagctaattccaataaaggctgaaaggagtagggtagtcttcccccgtatgttttttgtattctgccacaaatctttgataagtaccaatagcagcattttcatgcttaagcatgaaaagtgacttgatgcaacaagacaaggctgtttcgttcaccggatcaatattgaattccgcttcagccaaactcacagcttccgaataatcctgagcctcaaaagcctctttcatcaactgtaaaacaagcacttccaggcggcactccacatcttgcttaaaaccgtcgaacaacggatcgtccataaagccgacaaacttgccacgccctacaatatgcaggaactcttgccggcaattctctacccggttttcagcaactatcgccataaaacgcagatagtcacaataaaagacagaagacagcgtgaaacgaaaacatcctttctcataaaccagttctatgccatccagttctttcagaatcttgcgcaaatgattgatggctactccacgcgagtttttcactttatcttttggcttgtcgggccatatcaagtcactcagttgtttggaagaaattccgtcggcatcgctataacgcaaaatgagacagaatatttgtttgatacgcaaggaaaacatataagagatgttgcgaccactccggtcgaaaacggaaaaatcaccgaataaatacatggagttggcagttcccgcatctactgcctgcctctccatcttagtggtatcagaagcatcaagaagctgttccttgtcttgtctcacagctttgccggcctcgcccttaccggagtttcggcgccacttgtacactatccatacgcctccaccaactacaaccgcgaccgccagcactagccatacacgtgaaacacttcctccactgttattcgcaatatatttttcaagagaaaccggtggaaagagtaacgaataaacagaaaatttggaagatacgtcatcacgtgtttcctgcaccgtcacaaaaagcctgcttaaacgctcgttataataaagacgagcatttgtcgtgattttatcagagtaaatgggaatggaatcacccaatatctgacagctgccatcttttataagaaaacggtagagacgcaaaaacgagttagacacactctcgggataacgcaagacataaaaacaagaatcattctgtatcagcatatcctgcaccggcaccacattgggctgcccttccgaaatatcccaaagtttctgcacatgcatctcttgcaaatccaccttataaagatcgtgaaaataacggcggcctattacctggtcacccgactcattgcccataccgccaaaaatatagacagaatggttactgtccaaataaccggccgaagagaaataacggggacaaagaaaatcaccggatagagaaccaagtgtatcccaacgcgcttcttccggatcgaatatatagaatttattactgtaatacatattgccgaaaccaccgaagatggtgtaacgcttgcggactgcatcataataggaacaatgatgatgcaactgcatgctgagccgactgtaactctctactctccagcccaatgtattcaagtccagacttgctatcataggctccgcatccccattctctgtatatacctcgtagacatataacctttcactggcactgtcaaagaaactaccggcaagaaacaacttcacaggacaccgttcggtaaaagccttggcagaaatatttcccgtttccatattgtagacaaacaacgaatcacgattgaaataataaatctcatttctaccaatattataacaagaacctgcttctgaagccgacgcaaaaccgccctcccgcttccagtgaaaggcctcattaatcagccacaccggattttccactttaccgtaaagaatcccttcccggtcaaaaaccgattctccttccgcctcatccaaaggaaacgtgtaagtgtggtcagcgtgcacaaccaacttatcaatagctatctctggaacgtcaataatgtggtcgctcttaccgaacactattttcgggctgaactcatcggcaagtgctacacccttgcatactttttcctgatcatgaatcttgagagtaatctcatcctgcttcaagttaaaggctatcttcaccctgaaccaatgggatttcatcgctccagccttattgacaggcaaggctatcaacacacacttcccctcttgattcaaacggaacaagatatcatcaccacgaaaatcaaaaaaaagattgaaaatctgtccttcatccttccccttaacacgcaagatataaccgacgctctcggtagaatacaaagctatattgaactccaagtcaaaatagtctctgaaagaaggataactatgagcaaacacatcataggatgttctttgatcaataggactgaccgcgccacgaaatcttaatccgtatgcggaaaccagttgggtagtgcaaaggccaattataaaaatgatatatctatacaagtgtaccattaggtttcatttaaggttatgcaataccatcatcaaacactagccaacatttattaataaatgatgggaagattggaatgcaaatatattaaaatataaacgaacgaaaaatattttctttgaaaaagtaatatatcatacagtcacaagactttccaaacggatgttgactaaatttatactaaatgaaaagacaatattcgtaagagaagagattatggaggtaatgactgcaaataccgaaatgacggcagtaacctacagtacataatgacaatataagaaactaaaagtccgtatcatctcagtgcccataaaggctgcagatgtacggacttgatgaaaagcaggcacaaaggagattacatgaactgcatgaagaaaagctatgacgcgggtactcccgtcacaattccccggccatgtgtccctatatagacccgcccatattcctgcatgtcaccgcagatatgcaataccaggccatattgatggacatcatcgttgatacgtacccaagagttcgccgcatcgtcagaacggaagaaaccgtattgcccgttgactacgcctatcagatagatggcaggataatcattgcctggctttgccttgccgaaaccaaaagcatagatggtacgtaccttatccaaagcacggaaatcaaatttttctgaagcagcagagcggtacaaaccatcataagctgcaatccacaaatctttttcatgaccgggagtagcgtagatacggtcttgtcctccacgcggatctcctcttcgtacggcggcaccggcattaccccgttggaaccgtttaacagttaaattcaatgtgtcggcatgaaaagtcgccccaccatcctcgctgctatacaatatttcggccacagcatctacagcataaaaacgttgggggttcaccttgtctgcaatgacgcggatattcttaggcaaaccacggcaagatagccaagaagcccccttatcacgggtcagataagcctccgagcggtcgggtgtccaaatccaagaagagccgtctgctgccacggcgatatgcccattacgagacttttccgtcggaacagtggcacacatagtccagtgcctgcccccatcttctgaatatgaaatggtctttgcacccggctgatggccgaacagtgtaccaactctgactatcaaatcctgcttcagccaggcacccgtcactccattcgtatttccgaaatgaggattggcatggctgcccaacgaatcgggccgattgaggtcgaaatgcgtaaagccaccataatcaccgataccggaaatcagacgcgcccctttttcgggagcatagagttcgagaggcacggtctcttcgataccggcagacatgatactccatttcaccggttccccacgttccacggcagagaggttgaaagtttcccaaccgccgaaaccggtggtaaacatggcatgttcagcgtcggtagggtctatctctatgtcgaacatccagtgtaggggcgctacctttgtatagggagctttggaataatcatactcatatcccgtcttgaaaatcggtttccagctcttgccaccgtcagtcgtacggaacatctcatcacttttataaccgtgcttgccccctagactgtgtgtactggcaatcagatgcttcggattacgagaatctacagatacggctgcatagccaaatcctgccttttcgccacctggcagtctgacgggagaaatgtctgtccatttgcctttacggatatcgtatttccacacacctccatcccccatctggcttggaccgggagtatccccatacgtcagaatcaattgcccgtcaccggtcaagaccatatgcgtggggcgatactgcaccggctgcccctcaaccggctgccagctttcaccatagtcgtggctcacgaacagattttcccttcccatcaatgaagccgccacataaatgtcacgggtaccacgcccatcttgagtaccttgtacatcgtagactatgcagacaatgccactaccgcgattcccccatgcagcacggtcggcaggattgaacttctcggagacatccgggaaagacaccacccgtgcccagctctgccccttatccatactgcgccacaaaccatgtaaacgggttcccatataaatgatattcccattctgcgggtccaccatcatccgttccccattaccacgcccgttctcgttgccgcccatcgtaaagggcacatcgacacgggcaaaggttctgccgccatcataagaacaaagtatggccccattggagctactggtatacgtaccgcaggcaatatacacgttctgcggattctgcgggtcgatggcaatgctctccaccccctgcagattgctttcatccagacttatccagtccagcaagggcgtccactggttggaagcagcgtcccaccggtaggctcctcccatatcggtgcggcaataacggacaccgggagcttctgggtgaaaaacaataccgtccacaaagcctcctcccactatcggtacactcttccattcgtaagaaacggaattcaccggagatatatcttgagcaagcatcggcatgccgcccagcatcaaacttattcctgctaaaaacaactgtcttttcataagcatcagagttctaaaacaaacgttcttgatattttcttcaaagataggaatatttcattgatatttcagactgaaacttttgctacagtgcacatataatcctaacaaccaacgttttaataaaagcaagaaactaaatcaagccataaaaagattaaaacggcacctatcacagttcttctctctaacagtttttgtaacaacaatgcaacatatatgacacaaaaacacaacacgcatgtccgaactttgtcaccgacaaatcattcgacaacaacagattatgaaaaaaagtgcattgacagtactaattgccctgctgccgctggccgcaattgcccaaacgccctccatcaacgaggacggaaaaaagattgaaaaggagaagatggaaaccaaagactacctaccggaagtccacggaaccatccgcgccaaatacgaatatcagaccaccatgggtgcaggacgtttcgaagtacgcaatgcccgcatcagcgtgacgggtaacgtattgcctagcgtagcctacaaagccgagatagacctctccgacgaaggtcaaatcaagatgctggatgcctacgcccggcttttcccgacaaaaggactgacagtcaccaccggacaaatgcgcgtccccttcaccatcgacgcccaccgctcaccgcaccagcaatacttccccaaccgctcgttcatcgccaagcaagtgggcaatgtacgggacgtggggttcacagtaggatataccctgcctaccggtgtacctatcactgtggaaggaggacttttcaacggttccggactgactaaccagaaagaatggcacaaggaagtgaactactccgccaaagcccaatttctcttcaccaaaggactgaacctaacactgagcgtgcagagcatccagccggaagaagtacgtatgcaatcctacgacatcggtgcctactatgaaaccggccgtttccatatcgaaggcgaatatttgtacaagcaatattccgacaacgctttcaaagatgtacacgctgtcaacaccttcatcaactacgatctgccgttacggaaagtattcaacaaaatgtctttcctgctgcgctacgacatgatgaccgaccagagcgacgccaaaaccgccgatgaagaaaccggcagattgacggtgaccgactacaaacgccaacgcctaacgggcggcatcaccttcagcctcagcaaagcattccgcacagacctccggttgaattacgagaaatacttctatgccaaaaacagcatagcgaaggagtcggaacaagacaaagtagtattggaattgatgatacgcttctgatatttcttggcttccccttgtttctttcattccaaaaatgtatatttggaataaattattccgagctatggcaaatccaatcatacccggtataccgcagactgaacaagacttattgtatagtaaactgaatgcatacaatcaagggagagcctcttataaggaagtaggcgcctatcttatcgtactgccccggcctgagtatctccaatatactttgtggatttactctccactgcccgggagacagtccatcttctacatttgcgacctttccaccgacattcacgaaacgctgcggatggcaagcacgctatgcttctactcaccgcgcagcctgctgcttgtggagtacaatgccaaaagaatgcagagcaaaggggacgacattatctccataggcaaacaccacggacatttcctgcacgaaattctccgtatagacccagcctatcttacgtggatagccttcaaattccagccacgcatccccaagcaggaacgtttcgtacagattgccaagatttaccattcagtccacctcgacatacaacgaagaaaaacgtaccaaaccaccggcggacgtttcctggggaaggaaggggaaaaagtggagaacctgacactgaccgtactcagcgtgcgactggaagacaacccctacaagacgcagctcaaagggaccactccttatttctatgtacgccaagtgttgaaactgaaagactccatcggcaacttcgtcagcatccggctgaatgcacgcacggcaagccggaaatcatgccagctgcccgccgtggaacatgcctaccagatgggagaagtaatgaagatagcatcggcacgcatcgcgcgtacctatataataggaagtacgaaatacacccgattgacacatgtaaagttacacgtccctaccaggtaaaagattttctatcagatacgaaccacacgctgcatacggctgctttcccaggctgcctcaatcaagcggatgactccgaccacctcgcgggcatcgctctgcaaaggttcgccgtggtggatatgccgatagatattctcataaaaaactgcataatcaccgggaagacttggatagggttcataaacaattctaccgtctttttccgtataaagcagtccccaagaggatttgtcctcctcgccccagtgcgaagtgccgggcaatacgccctcggtcaaggcggcttcctgcgggtcgaaaccatatttcacgtaagaaccttccctaccgtggaggacgaaacggggttcgctcgcacacatcagatagctggatttcagcgttatcttcacttcgggcgcctttgagggacgtagcaaatggatgatgaaatagtcgtctaccttgctgtccttgcgcaacgtggcaatatctgcaaagacggcttcgggcataccgaacagctgcacagcctggtctatgacgtgggcacccaggttataggtcaagccgcccccatcttgtccggtttccttccaagtattcggcttgataaaattacgataacgggggaaggtggattcaaactccaccagatgccccagcaagcctttggacagtatttgcttaactgtcaggaaatcgcagtcccaccggcggttctggtaaacgctcaaggtcagcccccggcttgcggcaaatgccacaagttcctcagcttctgccacggtggtggtgaaaggcttctccacaaccacatgcttacctgcttcgagggcgcggcgggcatactcataatgagtgctgtccggcgtgttgatgacaaccaaatccagctcttccacttcgataagttcctcaaaactccgcacaatacaagcgtcgggatacttctcccgggagagttccttactgcgctccgtaacggcagtcaattcaaaatgagggttagtggagataaagggggcatggaaaacacgtcccgacattccgtaagcggctaatccggtccttatcttgtccatatcgttctttttaagttcaccattattccgtcaccaacggacgcttacgccaatcgtccttcatatagctgtcggggtagaccgtcttatcaataatttcgccacctttcagacgaatccaggtggtgaaagtacgggcaccttccttcatcaaaatgacacgtgcaccgttggacaaatggttgtactcggtattaccaccggtgaaacggccgtaagccagcaggatacctttccacattacggcataatcgttgtcatgatcgtgcccgacaaacatacccatcacatcaccagcctctttcatggcagtgaacatgcccgtattcagttccggagcgcaagccttttccatgcgggtacctatcagtatggcgttctcgtcggaagcggcttcgttatattccggcaaaggaatatggaaaaatgctagtgcaggcaaaggttgcccaccgttctttgctttataagtggcactctgctggcggtaccagttcacctggtcgaaagtaagccagtcgtacccctttacgtcgggtagtttggagtaggaatgggaatccagacagtaaagcagggctgcatccttcttgccgtccgaggatttcagtgtgaggacatagtcgggagattctactccgccacggtcgggctggatattgaaaggcatggaacggataacgtcataaagctcagcacgtgtttttccctgctcgttgtcgtggttgccaaaggttacgacaaaaggaatcttacggtccgtagcataggaaagcaccttgcgcatggctgtatcggcaggtgcggcataaaccacatcgccggtaaagactactaaatcggggcactcagcatcaagcacctcgccaatacgcttcaaagcaatatccgaagccggattgccatacttgaagtggatgtctgtaaactggacgattttaaactctccgttcttgttgaactgcaaaggcgatacttgtgccgggcagaacaaggaggataaaagtgtcagacaaaaggccaaggagattttcttcatataagtggatgattaaattgagttgatattattattcctttactatcaatacagtggcataggcggatataccttcctccctgcccgtaaagccgagtttctccgtggtggtggccttgatggagatggcatcctcatctattcccatcaccgcggcaagcgtacgctgcatttcgggaatataggtcttcaacttaggccgctcagcgcagatggtggcatcaatgttacctaccgaatagcctttggtagctatcaattctattgttttctttagcagaatcttactgtctatgttcttaaactcaccggcagtatcaggaaaatgatagccgatgtcacgcatattcgccgctcccagcaatgcgtcacagatagtatggatgagcacgtccgcatccgagtgccccaacaatcccttttcatgttccaggcggatgccgcccagccaaagttcgcgccctgccaccagttgatggacatcaaagccaaaacctacacgtatcttcatatcgttgcttctttaagttgacacgaaagtacggaaaaaaagcgaggtaacaagaaaaaacaagacgaagataatcagcgaatattgaagtcaagtactttcccttccccaagataaccctgcaagtgctgtccgatgctgacgggagcgactcccgcgggtgttcccgtgaacagcaagtcaccgattttcaaggtcatgaagcggctgacataggcaatgatatcatctacccggaacaacatgtccgctgtatggccacgttgaacctccttatcatcaatcgtcagacgaaagtccagattctgtacattgccgcccacctgttccaaaggaacaaaggtaccgatagctgccgaattgtcgaaacctttgcaaagctcccacggattacccgcctcacggaacttacgttgcaagtcgcgtgccgtgaagtcgatgcccaccgtcaccgcatcgtaatagcgatgggcaaagcgaggagcaatattcttgcccaaacggcagatgcgtaccaccacttctgcctcataatgcacttcgttggaaaagtcggggataaagaaaggtttgccatctttcagtatagctgaatcgggtttcaaaaaaataaccggttccttattctcgtgtgtatgtcccagctctttgttgtgcagagcatagttcattcctacagcaataatcttcattacttgatttcgttaaagtttagtctgttaaacatcacggccagatgggcataaagggaagtgttctgcacgacaatgttctcgggaacgcggatacggaacggggtgaagttccatacggccttgataccaccctctaccatggaatccgttatctgctgggctatttcgataggtaccgtcagcacgcctatattgacatcgtactcctgcatcttctgcttgaactcgtccgaatgatagatggggatgccgctcaatgtcgtacccaccaattcaagcttcacatcaaaagcagccactatctccaaaccgaaatggctcagacccgagtcgcgcagcaaagcacctcccaagcttccaacaccgaacagaaatgctttgtgtatattggtaaatcccaggaaatcctccagtacagctatcagcgtgtccacctcatatcccacacgcgtacggcccgagatattaacatacgaaaggtctttggcaatctgtgaagcatcaatattgatttccttggaaatctgggtggatgatacgaatcgttcccccttttgtttcagcaactttacattggaaaggtaccacggaagccggcgcaaagtaggttccggcaccttcatggtttcttttttctgtaacggactgctcatagtttcttatttaagttctcaatattgcgattgacaaaagtagtgctttttttctaatcagtaacacggatgcaacaaaagcttaacataatttctaattgcataattccacataatatcgtacttttgggaagttttttaaaaaaagtatgaagaataatgattggaaagaacggttgaatatagtctattccaccaacccggactacaactatgagatgaatgatgacgaggagcaaactaccctcccctctgcacaacaacgcctgcgcgtgcagttggaccgcaagaaccggggcggcaaagtcgtcactcttgtcaccggtttcgtgggcaccgacaatggcctgaaagaactgggcaaattgctgaaaagtaaatgtggagtgggtggaagtgccaaagatggagaaatcattgtgcagggcgacttcaaacagcgtgtcattgacctgctgaaagctgaaggatacacgcaaactaagcccgtaggataaaccaaaccatcatccgtctcactgcaactgtagaggcataaaaaaagtgaccgtttaggaattcaactccatatacggccacttctttttatagaatcgtttctaagcggaattattcagcgcgcaaagtaaaacgcttgaagtcaacaaccttcaattcaggatcagcttctttcaagacttctctaactgtcttcttgccatccatgatgtcttcctggttcagcaagcaaacttctttcaagaacttgccaagacgacccttagcaatattctgaatcatttgttcaggcagatgtgcagccttctcagcagaaacagtagcaatgatttcctttgcctttgccacgtcttcagcagtaatccagcccttggccatgttgctttccatgtggtcttcgctgtccacgtgagccgggttgataccagccttcttcaaagcggtctcaacagccttctgtacctgttcagcttttgtcttctctatagcaacatctatttccttctgcttgatttcttcagatacaccatcttcgtctactgcaatcggattcatggcagcaatctgcatggcaatctgcttagccagtccttcttcaacagccttgttgaaagcaacaatagtgcagagaccgtttctgttcatgtggttataaaccacagtgcttgcgccttctacagtcatgtaaccatccagctccatcttctcgccagtgataccgctacggtctgttacagcatcctgtacagtaccgttgcccatcggcaaagcttttacttcgtccagagtcttgcacttgttagctacggcaaggtccagaatgtcctgagtcagtttcacgaaatcagcattctgagccacgaagtcagtttcgcacttcaaagcgatgataacggcaaagtcacccgtagtcttagccagcacacagccttcagaagcctcgcgatctgaacgcttagctgcaacagcttgtcccttcttacggataatttccattgccttgtcgaaatcgccttcagcttcagtcaaagcattcttgcaatccatcataccagcaccggtcatcttgcggagcttggttatatcagccatacttacagccataatatctttttattttaattgttaataatatccttataaagtaattgagagttgagaatagagaattgagaattgccgtaaagtaactctcaactttcaattctcaactctcaacagtatgattaagcctcttcttccttcatgaaagcagcagccttagcggcattgattgcttcctcgtcggacttgtcgagtcttgcttttgtagctttcttcttgcctttgttggcaggagcttcaccggcagcttccatgtctaccttttcggccttacgttcttccagaccttcctgcatagcagcacagcaggcatcaagaataacttctactgacttagtagcgtcatcatttgccgggattacgaaatcgatattcgtaggatcagagtttgtatcaacgataccgaatactggaatacccaaacggttagcttcacgaactgcgatattttccttcattacgtcgataacgaacagagcagacggcagacgagtcaggtcagcaatagagcccaaagtcttgtccaactttgcacgttgacgtgaaatctgaagaatttctctcttggagaggtttgaataggtaccgtcgcttgtcagcttgtcgatggtagccatcttcttgacagccttacggatagtcgggaagttagtcaacataccacccggccaacgctcgattacataaggcatatttacagatgcagccttatcggcaaccacctgcttagcttgttttttagtagcaacaaacaggactttctttcctgatttagcgatttgcttcaaagcttcagcagcttcgtcaattttagcaaccgtcttgttgaggtcaatgatatgaataccattgcgctccatgaagatgtaaggagccattgcggggttccactttcttttcaagtgaccgaagtggcaaccggcttccaataatgtatcaaaatttgttctagacattttcttttaaattaatcgtttactttcttttttgtttcttctaaaccaaccgccgggtagtctgaatctgaagagtcccggtagtttagatactaaacgctttttcagttgagagttgagaggtgaaagtcgagaattaagcaacttgtccgccccaaccgttctccaactcttaacgtttactgaactggaatctacgacgtgctttcggttgtcccggtttcttacgttcaacagaacgaggatcacgagtcatgaagccttcagaacggagagcagccttgtcctcagcattgattttcaccagtgcgcgggcaattgccaaacgcaaagcctgagactgtccagtgaaaccaccaccgcagaggttcactttgatatcgtacttttcagcaacacccagcttgttcaacggctgtttaactacatactgaagaatgcttgatggaaagtactctgcgaggtctctcttattaatagtaatctttccggtaccttcgcttacgaaaatacgtgcaattgcacttttacgtctgcctaatgcatttactacttccattatctcttatttaagtatgttaatatcaatcattttcgggttctgagcatcgtgtttgtgctcgctaccggcatatacatacatattgcccagcaattttgcgcccaacttgttcttaggcaacataccctttactacttttctcagtaacttgtcatcaccgttcggttttgcctgcaaacgggcaggagtgatttctctctggccgccgggataacctgtatatgacagatataccttgtcattccacttgttaccggttaattttactttgtcggcgttgataatgattacattatcgccacaatctacgtgaggggtaaagttaggtttatactttcctctcaacagtttcgcaacttttgcgcccagacggcccaatacctggtctgtagcgtcaacaatgacccattctttagtcactgtagctttgtttgcagaaatggtcttgtaacttaaagtatccactcttaattgttttttaaaatgttactactaaaatgtttttcttcaccgcaagccagtcatcccggacaatggaagattaactcgctatgaattaaatgcttatcctttcgagataataatcggcttgcaaaggtacggtttttcttagaactggcaaaagttttccacttttttttagagagccacttggctgatatacaacagacaaagttatcctgcggagaaagggaagaatctccgcagaacaactctttatgatgcggccttcatcggtcgatgccgtcatagaaggctttcaaagctgcatgagaaagaaacgggaaagaaaaagaaatatcaacgaacaaggtcttcggggaattttgcaggcatgcccacccgcttccatgtttcatggaaccatgtattcagttcattaccattcaagtccttagctataaaatacttcaggtacattaccccgtcgtcccctatttcaaactccagtatattgtctttatggtccaacatgggcaaatggatgtttttctcaatgctttccttataggaattatccgtcagctgctgataagtcccatatccagtgatgatggcatctttgcctggaataattgtaaaattgacaatacggccgtcatcactcagcactttaaaggtgttactcggtttcaatatcccgggaacatccgggatttcagacacataatgacataactgccaaattcctgccagttccgcaggcctaaactctgcgctctcctgcgcattggctcccgctaccgcaagcagcaccgctgccagcatggtaaagaaatagttccgtttcatattcgtatgatgttggttaacgttatgtcgttccgttagacacaaatataaagatttattttgagattataacatttttagatataaaaaaaccgcacaaacaacagaatgtttgtgcggatgattttatccagtttgtatattccaaaacctagaactcggcgttacgcggcgtacgtgggaacggtataacatcacgaatattcgtcatgcccgtcacgaacagcaacaaacgctcaaagcccaaaccaaatccggagtggggacatgtaccgaacttgcgggtatcgagataccaccacatatccttcatcggaatgtgaagttcgtcaatacgcgtcatcagcttgttgtaatccgattcacgttcggaaccgccaatgatttccccaatcttcgggaagagcacatccatggcacgcacggtcttgccgtcttcgttctgcttcatatagaacgctttgatttccttcggatagtcagtcaggataaccggacgcttgaagtggtcttccaccagatagcgctcgtgttcggaagccaagtcaactccccagtacaccgggaattcaaacttatgtcctttggcaacagcctcttccagtatcttgataccttccgtatagggcaggcgcacgaagttttctttcaagacaccttgcagacgttcaatcaatcccttatcaaacatgtcattgaggaacttcacatcgtcggcacagttgtccaaagcccactgcacacaatacttgatgaagtcttccgccaggtccatattgtccgcaatatcattgaacgccacttccggctcaatcatccagaactctgccaagtggcggggagtattggaattctcggcacggaacgtaggaccgaatgtatagatggctcccaatgcagtagcggcaagttcgccttccaactgtccggaaaccgtcaggctggcctgctttccaaagaagtcatcatcgtaaataatggaaccattctcgtccttcttcaagtcatacagattctttgtagttacctggaacatctggcctgcgccttcgcagtcggaagccgtgatgatcggagtatgaaaatagaagaaccctctgtcatgaaagaacttatggatggcaatcgccatgttgtgacgaatacgaaacaccgccccgaacgtattggtacggggacgcagatgggctatctcacggagaaactccatggaatgacctttcttctgcaacggatacgtgttatcgcaagctcccagcacttcgatctcgcgggcctgcacttcggccttctgaccggaaccgacagattccgtcagcaccccgtttacactcaaacaagcaccggtagttatctctttcagcatctcctcatcgaagttacccaagtctactacaatctgcacattatttattgtagaaccgtcattcagcgcgataaagtttacttgcttactacctctgcgggtacgaacccagcccttcacgttgaccatagcgccaaaatcttcacgcttcagcaggtcaaccacctttgttctactaatcttttccataaaacagttattataccttattatatattactcgaaagaacccatgcgcaggaagttcacctcttgctccgtgaggtaacgccattcgccgcggcgcaggcctttcttcgttaaaccggcaaaatatacacggtccagcttcatcactttgtatcccagcgattcgaagatacgacgcacgatacggttcttaccggagtgaatttcaatgccgacatcatctttcttgacgtcatccgtatagctaatggcatctgcatggatttctccgtcatccagttgaataccggccgcaatttgctccatatcggcttttgtcagattcttgtccaaatgcacatgatatattttcttcttcagatacttgggatgcgtcagcttggaagccaagtcaccatcatttgtcagcagcaacacacctgtagtattgcggtccagacgacctaccggataaatacgttcattgcaagcgcctttcaccaaatccatcaccgtgcgacgtgcttgggggtcatccgaagtagtcactgtatctttcggcttgttcagcaggacgtaaatcttacgttcgatactgaccgtctggtcgtggaacttcacttcatcaccacgtttaatcttggttcccaattccgtcacgacctctccgtttacagaaacaactccggcagtgatgaattcatcagcctcgcgacgggaacaaacaccggcattggccagaaatttgttcagacggataggctcgttcgggtccacaaactgctccttatactctatctgtttcttcttgctgtacttagcattgggggcataatcggccgaacgacggacaggacgactatagctatctctgttaccatatccgccaggccttccaccacccgaattgaagcgtggacgataaggacgatcaccaccctcattattgtagcgaggacgctgcagacggtcgccatcttcactgttatagcgcggacgatagggacggtctgtattataagaacgatcactgttataaggacgttgcggacggtcaccaccttcattaccataacgcgggcgctgcggacggtcactattataagggcgttgcggacggtcgccaccttcgctgttgtagcgcggacggtaagggcggtcccccgaattgtttccataaggacgttgcggacggtcgccgccttcgctgttataacgcggacgataagggcggtcgccattatcattattgtaacgaggacgctgcggacggtcaccattgtccgcaccaggattaaagcgcgggcgataaggacggtcactgttataaaggcgttgcgggcggtcgccgttttcactgttaaatctggggcgataaggacggtcgccattatcacgattgtaagacggacggctgtagccaccttccttgttaaattggttaccatcgcggccggcacctgagttctcctctgaggaagaagcatcacgccaagtttcgttttctgtactcattgctttttattcgaataaaattaaaccttggcctcacggccattcattgtctctattataccttgaattttatatgtttctataacaattgccggaccaaaaagttgaaattcctccggcacacttctgtcgttgcttaaattcccgtataagtatggggggtaatcacccgcaattccttctttatctcttcactcacattcagtccttctataaattccttgatggacgcttccgtaatggcctgattagtacgggtcagcgctttcaatgcttcatagggatgcggataggcctcacggcgcagaatggtctggatggcctcagccaccacactccagcagttgtccaggtcacggtagatggccggttcgttcaacagcaacttacgcaaccccttcaaagaactttgtatggcaataatgatatgcccgaacggcatacccacattgcggagcacggtagagtctgtcaagtcacgctgcaaacgggaaaccggcagtttcaccgccaagtgctcaagaatagcattcgccatgcccaagtttccttccgcattttcaaagtcaatcgggttcaccttgtgcggcatcgcgctggaacccacctcaccggctttaatcttctgcttgaaatattccatagatatatattgccagaagtcacggttcatatcaatcatcaccgtattaatgcgcttcatggcatcaaagatggcagacagattatcgtaattggatatctgggtagtatactcctcgcgttccaagccaagcttttcggaaacgaacttattgccaaatgccttccagtcatattccggataagccacatgatgggcattgtaattgcccgtagcgccaccgaactttgctgtcaccggacaagccttcagcgttgccagctggcgttccagacggtagacaaacaccattacctccttacccaaacgggtaggcgaagccggttgtccgtgtgtcttggcaagcatggggatagcggcccactcttccgcataagcacggagctgcgctatcagttcctctatttgaggatagtacacctgctccaatgcctcttttacagacaaaggaacagacgtgttattgatatcttgtgaagtcaggccgaaatggatgaattccttatagtcctccataccacccaacttatcaaactcttctttcaagaaatactccacagccttcacatcatggttcgtcacgctctcaatatccttgatgcgttgtgcgtcggcttcggagaagttacggtaaatgtttctcaaggtttcgaaaacgcccttatccacccctttcagttgcggcaaaggcagctcacacagcgtgataaagtattctacctcaacttgtacacggtatttaatcagtgcaaattctgaaaaataggcagccaaaacatccgttttgcctctgtatcgaccgtcaatcggagagattgcggtaagtaaatcaagtttcatacgtcgtatttatgatgataattatcggactgcaaaattactgcttttttctgagtaacaagacataaaggataaagattttaagaaaaggaagttaacggataaaaaaaatggcctcacaatcacttgcaagaccaccttcgaatgaaaatttccagtgggcgttgacggattcgaaccgccgaccctctgcttgtaaggcagatgctctgaaccagctgagctaaacgcccttttgacgaacgaaagtgcttggattttgtgtgggcgttgacggattcgaaccgccgaccctctgcttgtaaggcagatgctctgaaccagctgagctaaacgcccgtacacttccgtttcaaaagcgatgcaaaggtacagcttattttgacattaccaaaacttttgcataatatttttcgatatttttttagtcatttagcgacacactctgtttctcaagcatttagcatgttcatttttttgcctcatttttccgaatgacctttgccggattaccaacggctatgctatcggatggaatatctttcgtcaccacactacccgcaccgatgatacaacggtcgccgatggtgacacccggacacaaaatggcaccgccgccaatccagcaatcctctcctatcgtcaccggataggcatattccttttccgtacgacgttcgatataatccatcggatgatggggagtgtatatctgtacgcatggaccgaccaacgtatgggcaccaatcgtgatatatcctccgtccaggaaagtacaattggcattgacaaagacatgctcacccagccggataccatccccgtggtcgcaatggaacggcggacagatgacggacgtggcgggaatacccggtaccagttcctccaacaagctccggtaatcctcatcgtaagtactcatcacacgcatctttgccagcaagcgcttggcatgctcaaacttcacttgtatctccggaacggacatgtccgccaactgggagctacgcattttttccacttcattcatattgtttcttcttttgattcatacagagactcagccccgaacaaagatagggaaataaaccctgtataacaaaagagcggaaaacctttcggctttccgctcctgcaatcgtttacagagcaaacaaattatttgtactcctgccagctcttaatctggataccttccagattcatttcgcagaatgcctcgataaaggcacttgcgaggcgggcattggtaatcaacgggatattgtggtcgatggcgccgcgacgaatcttgtagccattggtcagctcacgtttcgtatggttcttcgggatgttgacaatcaagtcgaaggcatggtcggcaatcatcgtcatcacgttgttttccgcatccgggcgttcatccggccagtaaacggcctccgtcgtcacgccgtgagcgttgaggaaagcggctgtacctgccgtagcataaatcttatagcctttggcaaagagcatgcggctggcatccagcaaatctaccttggacttcatggctccggaggagaacatcacgcccttctcgggacgagggattctgaatccggtagcaatcatggcattcagcaacgcttcggagaaatcatcgccaatgcagcccacctcaccggtagatgacatgtctacacccaacaccgggtctgccttgtgcagacgggagaaggagaactggcttgcctttacaccgatgcggtcgatgtcgaatgccgacttgtccggttgtgtataaggagcgtcgagcatgatgcgggtagcagtctcgatgaagttgcgcttcagcaccttcgatacgaacgggaagctgcgcgatgcacggaggttacactcgataaccttcacctcgttgttgcgagccaggaactggatgttgaaaggaccggagatattgagttcctttgcaatctggcggctgatttttttaatgcggcgtgccgttgcaaagtaaatcttctgtgccgggaataccagagtagcgtcaccggagtgtacaccggcaaactctacgtgctcggagatggcgtattccaccacttcaccgttttgggcaacagcgtcgaactcgatttccttggtgttctgcaagaactgggatacaacaaccggatattccttagatacttcggcagccatcttcaagaagttttccagctcttcttcgtcgtagcatacgttcatcgcagcaccggagagtacgtaagacggacgcaccagtaccggatagcccaccttctctacaaagcctttcacatcttccaggctggtgagttcctgccaagccggctggtcgatgcccagctggtcgagcatagcggagaacttgttacggttttctgcacggtcgatggagatgggtgaagtacccagcacgggaactgactggcggtgaagcttcatagccaggttgttcggaatctgtccacccactgagacgatgacaccgcgcggctgctccaggtcgataacgtcgagcacacgctcgaaggagagctcgtcgaagtagagacggtcgcacatgtcgtagtccgtagaaacggtttcggggttatagttaatcatgatggacttgtagcccagcttgcgggcagtctggatggcgttcaccgaacaccagtcgaactctacagacgaaccgatgcggtaagcgcccgaaccaagcacaaccactgatttttcattcttataatagttcacatcataaccctgaacggcatacgtcatgtagaggtagttcgtcagttccggatgttcggaagccaccgtattgatgcgcttcacggcaggcaggatgcccagctctttacgacgggcacgtacggcgaggttttccttctccatattgccttgcggattcagtacgaagcgggcaatctggaagtcggagaagccaagcacttttgcttcgcgcagcacatcggcaggaatgtcttctaccttattatattgagaaagtttctgcttgtagtctacgatgttcttcagcttgcccaagaaccagggatcaatcttggtcagctcgaagatacggtcgatggtatatcccttttccaaagcctcggcaatagcaaagacacgcaggtcggtggggtgcgacagttcataatccaggtcctcgaattccacgtcttcattacccacgaagccgtgcattccctgaccaatcatacgcagacctttctgaatgatttcttcgaaagagcgaccgatggacataatttcacccacggacttcatgctcgaaccgatttcgcggctgacacctacgaacttcgtcaagtcccaacgcggaatcttgcaaatcaagtaatccagctgcggagcggcatatgcagagttgggagttcccatctcgccaatctggtcgagcgtatagcccaaagcaatcttggcagccacgaatgccagcggataaccggtagccttggaagccaatgcggaagaacgggagagacgtgcgttcacctcgatgacacgatagtcgtttgtctcggcgttgaacgcatactggatgttacattcacccacgatgcccaggtggcggatacatttggtggagagttcctgcaacattttcacctgctcgtcggtcaatgagcaagtgggagccactacgatggactcacccgtatgaatacccagcgggtcgaagttttccatgcttgccaccgtgaagcagtggtcgttggcatcgcggattacctcaaattcaatttccttccaacccttcagagactcttctaccagaatctgcttggagaaagtgaaagagctttcggccaatttaatgaaggcttcctcgtccggacaaataccgcttcccagtccgcccagagcataagccgagcgcaccatcacggggtagccaatctcgcgggctgccttcagtgcgtcttccatgctctccacagcgtggctcttcggagtcttcatcggaatctcgtccagcttcttcacaaagaggtcacggtcttcggtgtacataatcgcctcaacggaggtacccagcacgcgcacgccatatttctgaagaattccgttctggtagagttccgtaccgcagttcagcgccgtctgtccgccgaatgccagcaaaatgccgtcgggacgttctttcttgatgatttcttccacgaaataaggagttaccggcaagaaataaacttgatcggcgataccttccgatgtctggatagtagcaatgttcgggtttaccaaaacagaaccgataccttcttcgcgcaacgccttcagcgcctgcgaaccggaatagtcaaactctccggcctgaccaatcttgagcgcaccagaacccaagacaagcactttctttaaattcttttccatattctcttgttgtctattaagttacgagttacaagctacgaactacgagttgtagctatttcacaaaaaaaatgcgtcacccaataaaggattaacgcattaccaaagaactaaaaatatctttctcgaaaaaagagaaactgacggctcccgaatgaaattcattcgaacggaggttatatttgcttctcatttcctgcgattgcatagtctctttaaaatttgtgcaaagtaacgacttatttacgaaaagagcaaattgtggcatgtttttttgcataaaagaaacgtcatcctccataatagaagaacgaccgccacccgcaaccgaaatctttttccgaaaaatgcgattccatataaaaaagaaagactatacctcagtaaaggcatttgcagataaatatgaagattctccccaccaaaacttgcttttctcgccacggaaacttacctttgtgcctatacaaaaatagaacaaggattctgtttctacaaacaaagcctttattcttaaaaataaaatttctattccttggaataaaggctttattctaagatttctccgccaccaaaagaactttgctccgcagggaaaaggactttgcaacgaaggaaagaaaagaaaggagaacgcaacaatgaccacacgctaccaaatgaaagaaatgcccgacttgcaaggcacgggcgaaccgatcacctaccccaagatggtgatgaccggacagaccagcacgcgcgaactggcggaatacatcgccatgacctcgggattctcgaaaggcgtaaccgaaggaatcatctgcgagttgggcgaagccctggcccacgaaatgggaatgggacgctcggtgaagatagaaggattgggcgtatttacccccgcactgtccatctaccccgacaaggaacgcgaacagccccaagaaagcaccacgaagcgaaacgcacggagcatctacgtaagtggcgtgaacttccgcacggataaagccttgattagagaaaccaaccattggtgcgaactggaacgtgcctcctggaaacccgcacactcgtcgaagaaatacacccccgaacaacgtctggctctggcgcatcagtatctggacaaacacgccttccttactgtcagcatctaccggcaactgaccggactcgtccgctccaccgccactgtggaactgcgtaaatgggcccacactcccggcagcggaatcgatacaagcggcatcggaagccataaggtgtacgtgaaaaggaaagaaagcgtcatcccttgaggtttcgataattataggtatctttgccagccctaatggcttttatacaatgaagaaactaaaaaatacataatatggcaaaagaaaaaatcatccttacgggcgaccgccccacaggacgcctgcacataggacactatgtaggctcattgagaagaagagtggaactgcaaaactccggcttgtacgacaagaccttcgtcttcatcgccgacgcacaagcgctgacggacaatatggagaatccagaaaaggtacgccagaacgtcatcgaggtggcactggactacctggcttgcggactggacccgacgaagagcaccatcttcatccaatcccagataccggaactctgcgagctgaccttctactacatggacctggtgaccgtgagccgcctgcaacgcaacccgacggtaaagaccgaaatccagatgcgtaacttcgagacaagcatccccgtaggcttcttcacctaccccatcagccaggcagcggacatcaccgctttccgcgccaccaccgtgcccgtgggcgaagaccaggaaccgatgattgaacaagctcgtgaaatcgtacgccgtttcaactatatatatggtgaaacccttgtggaaccggaaatcctgttacctgacaatgcagcctgcctgcgcctgccgggaacggacggcaaagccaagatgagcaagagcctcggcaactgtatctatctttcggactctgccgacgaagtgcagaagaaagtgaagagcatgtataccgaccccgaccacctgcgtgtgcaagaccccggaaaattggaaggcaacaccgtattcacttacctggatgctttctgccgtccggaacacttcggcctttatctgcccgaatatccgaatctggacgaactgaaagcccactatcagcgtggcggtctgggcgatatgaaagtgaagaagttcctcaacgaaattatgcaagagacactggagcctatccgcaaccgccgcaaggagtttgaaaaagacatccctgccatctacgacatgctgaagaaaggttgcgaaactgccagggaaactgccgccgcaactttggatgatgtacgcaaggctatgaagataaactactttgacgacgcggaactgattgcagagcaaataaagaaatttagaggggaataagggaagaacacataagttaattaagaaaaggggcatgcgtcacggtaacgcatgcccctcgtcttttgtagctagtaacttgtagcttgtttcttttatcccgtctcctagttggctgatttcaccaacactacacggttcagaatcggttgtccgaacttgtcgacaccaccaccggcatccaccttcaggcggtcagcaggaattccgtattgttttaccaatacatcgaccacggcttgtgcacgctttaaactcaactctttgttgaatgccggtgtaccggttgcagagtcagcatatccgtttacggtgtaagtggcgttcgggaattgcttcatctgatctgccagataagacaagttcattgcttcacgcggagaaacttctgcagagccaatcttgaagaatacggtacgcggtgcaatgtccggatcgggaacaatcacttccgtttctgtaacttcggccaccggctggttctgtgcggcaaccagtgcattctgcagctgctggttggcagctcccatctctgcaagctgtgcctgcatggcagccagctctacctgagaaatcaactgaggcatcgggcgacggaatccacgggcggggaaacggtatgtcaaccctactgttgcactcagcacgccatcatatccatgatcgccgccaacttcgccatcgaacttatcttcaacgcccattgcgctcagctccaggttaatatctatcgcattcgaaatacggaagcgattgatgatacctgcgtttacggacaaagcttcgcgatgaggctttgtgtagttgtgagtgaaccccgcacctacataaggaatgatctcatatacgcggtgctggttgtatcctccaaacagcgcattcagattgaacatcacatctccgtgcagattcatatagtcgaaacgctgtttgtagtagccgtcatccatctgagtgcctttcacgtagtcagcacctgcatcatacgtatatcctcttgcctgaaggccgctatattgcagacgtactcccagtcccggggtgaaccatttgccgatggcaaaattcagcgtcggactgatacgcttgccaaaacttcctgccttatcattatctccaaaagttgcttcggcaccaccgcctatagagaaaaaccaattactccagaacggattagtgattacctgatatttatcctggacctggataacaccaaactcttccacaacttcagtcttttgctgcgccatggcaacagaagacaccccggccaaagccagtaacattagaatctttttcatataccttaaaatagttaagtggttaattaaactctttatcattcaaactgtctaattaacgccaacagaactaaaaggttctgaatatttgtactttttttgccttgatgccaaagaaagcactcttccttatttggagaaaagcttttctatgtcgtcttctttaatggtcgccagcaccgtctttccgtccggagtataattcggggatgggcatgcaaacagattgtccacgagattggacatttcctcgttgctcagcacttgtccataaacgatggccgcagcacgcgccaaagtcgatgcaagaattgtctgtacctcttccttaacgtcattccctttttccatagcagtatgtaccatattccggaccaattctaccgggttcaatccctctatgcccgaaggtatgccgttgatggcatagctgccgccacccagcggactcaaatcgaagcctacggccgacaaatcttccaatataccgtccagcacggcagcttccgaagccggcaactggataatctctggaaacaataccccctgcgataccccttgtttctgtcgaatctgactcatatagcggtcgaacaatacccggacatgcgcacggtgctggtctatcagcatcagacccgatttaacggaagtcagaataaaacgccccttgaactgaaagtgttgcgctcctttctctaccgttgcctcattgccgtagaaagaggcgcttgcctcggaaggaaccgtttcctgaaaataagaaaccctctcctcctctcttggagccgtaccggtaaccgtatcctctacaaaaggctcttccgccatcggctcgttcatcctgctagccttttccaaaccggaataaagcccctcccactccaccttggggcgcgaataattgccaccgcctccataggaagaagtggaagacgtcttgaagggattgaaatccgtgttatagtgtaccttcggaggctctatcggacgagcctgctcgaatgcaggaatatccggcatgtcctcggtatcaaaatcgatagtaggtatagcgctaaacttgcctaaggattccttgaccgcagccgatataatctgccagatagcctgctcattctcgaacttaatctccgtcttcgtcggatggatgttcacatcgatattggcagggtctacctcgaaataaataaagtaggagatttgctcaccggcaggaatcagatgctcataagcgtccatcactgctttgtgaaaataggggtgacgcatataacgcccgttcacaaaaaagtattggtgcgctcctttcttgcgcgaggtttccggcttggcaacaaaaccggaaatctttatcatcgtcgtattaacgtctacggacagcaactgctgattcagtttctttccgaaaactgccatgatgcgttgccgcaaaggcattaccggaagattgaacaattccgtatcattactatacagatagaaggctacctcaggatgcaccagcgctatacgctcgaattccgtaaggatattgctcaactccgtagagttggctttcaggaatttacgccgggcaggaatattgaagaataggttcttgatggaaaaattgcttcccttagggcaggaaacggcttcctggctctcgactttagagccggcaatcaacagtcgcgtccccagctcctcgctggctgggcgtgttttcaactccacttcagctaccgcagcaatggaagccaacgcttctccacggaagcccatggtgcgtagggcaaacaaatcggcagcttcgcgtatctttgaagtcgcatgacgttcaaaagaaaggcgcgcatccgtttcggacatacccttcccgtcatcaatcacctggatgcaggtcttgcccgcatcggtaatcagcacatgtatttcctctgcttcggcatcaattgcattttccaccaattctttcacaacagatgccggacgctgaatcacctctccggcagcaatctgattggcaaccgaatcgggcagcaaatgaatgatatcgctcatgataatgtttaatgattagggattaatgattaatcattattaaatgattccgttactgatggcataccacagataaatcaacacagccatgacaacaaggattatgcccaaatgcatcggcttacgtccgctctccttgcgccgcttcaagtgagttgttccttctatgaatttgccccgtatatcctcgggcgagaattccttttccggcagcatacccaggtcacgcttggcgttttcttccatcttcgccaacttctctttccgctcatccacatagatatagctatgattgaagccacgaggcttccgcattgcaaacattcccatgacgctacttattatttcgtttaatatgcatattccttggcgaagttacaggtttccggtcacttttcttcaatacttcacctgcttttttagccctccactcgaagatatcctccttgttgagcggacggatgtagtcgaaccagacaaaagaaggcagcttgctcttatctggtggaatctggtccagaggataggctgtaccggtagtctttccaacaaagactccgcgctccatccttctctccttcaagtacattttcaaaagtccgccttccgaatagttcatcataatcagcgaactgtccttctcctctaccggataatacaccaccagtacattgccgtttacctccaccagacgcatgtctccatctatgaagaaagccttcatctccttaccggaaacttggttatagtgaatactgtcctttttctctaccgtcagggcctggttgatgatatgcgcccagtcgatggtactatcgttcatgtaaattttaatttcctcgcccaacaactgctgttccccgtgccacaaaatagggtcggtatacatcgtcatgcaagagtccttggaattatacaccaacgaatcgcatacggcctgcacatccgtgcgataagcacgcaccttatgataggcacgcatctcccggtacatggaatcggtattcatatggtaggtaatcagcctcaaagtatcaccgtgcatgaacagactgtcgccctgcgaatagtcgacagctacggcacgtttggtggcaacggcgcttccggtcagttcgttgtagaaacagtagtcgccagtcaacatgttccggttgaccgtatcattcatctgtacattgtcaaaagcctcgccgtatcccaagatgcggtcgtagaaaaggctgtcaccggtcagtttcttgccttcgttagtcagtacggaacggtcgagcagttctgcctgctcagtagtcgtattgtacacgccacgttcggaataaatatgattttgatcactcacaatgtcggagggtcctaaaattgtggcaatcttagtagctgtactatacttcaaggtatccgaagtcaaaacaaacttcgggttgaccagcttcacgtcgtggttgaagacagccaacttagtggcagggctatattctccccactcggaagtcagcacattatcctcgtcggtcagcgtaccgccttcgaagtaatagcccaaatcgtacagacggtcatagttcaaactgtcagttgtcagcaccgtattacgatttatcatacgtacattctcacgcagcatggccaactgcgacatgccgtcataatacagatagtctccatagataaacaaggtgtcgccctgctccatacgcacattgccgaatgcctccacagaatttatcttttcgaatatcagcgcactgtcacagaacatgtacatactgtcatgcttcatcctcaccgagccgatgagtacctgcacatcaggacgcaactgtttgtccgcctgcgcctcatctgcgtacaacaaatcgacgcgcgtcttcttcttttccggcgtctccgtctttttctgttcaattgagtccactttcttcttctccggtgcaccagtactcttcttcttgtcctgcgcactcagcagacagatgccaaacaagcatagaatacctaccaggaggtatctatgcttgttcaggaaatgattttttgtattcttcttttgcatacaaatctatgtaaatccttccggattattctttaatccagcccggatacttgaacgtacagttattcttccaattatccttgatacggacatacgtgtgcttctgcttctcacgaatccacttgtccagcacttcgtcgcggcgtttttccaacacaatctctttcaagttctgatagtcatcggcaatggtagccttgtgtcccatcgtacggctcttcagcttcacaatcacgcactcttcctttccggtcttttgcggaatcatggtgaaggcttcggagatttcgcccactttcatcttatccaccaccttggctatttcagggggaagttcctgcatctcaaaacgggaagtgttcgtattaggattcggcaacaaaccatgattgttgcgcgtatccttatcctgcgaaagcacggaggcagcctcttcaaaagagaatttgttattgcggatatcatcagcaatagagtccaaacgggcacaaccggcagccagagcttcttccggaatatgcggtttcaacagaatgtggcgtgttttaatacggtcaccgcgcttctctatcaactgaatgatatggaaaccatattcagactctacaatcttggaaaccttgctggggtcttgcaagttgaaagccacattggcataagcggggtccagcataccgcgtcctgagaattcaatctcaccgccacgcatggccgaaccacggtcctcagagtacagacgagccaacatggaaaagctttcacccttattgacacggtcggtatactcacgcaaacgtctctttacatcttctatttcctccaaagggaccttaggctgctgagtgataatctgcacctccacctgggtagggatataaggaatgctgtcctgcggcaaatccttgaagtaacggcgcacctcggccggagttatcttaatctcgcccaccagtttctgctgcatcttctgaaccttcaatccttcacgggcattctcgcgcagcgtttcacgaatctggctggaagtcttgttgaagtattcctccattttctcgcgcgaaccgatattggcgatatacatattcgtcatatagtccacacgctggataacctcactctcggatacttcgatactgtcgagggcagcctgatgaagatacagtttctgcacggctatctcctcaggtatcacgcaataagggtcacggtcaaatttacgtccttcatacaatgcactcatgcgtgcctcttccacttcggacttcagtatagcctcgtcacctactacccacactacctcgtcaatcacgttgtcttgtccataaacggtagaaccgactaatagcgtcaaggcaaataaaattacaaacttaaagttcatacactgtttcattcttggtgtcttattctaaataatatttaatcttgtctcttttcaccgcccgttggtacaaatcatccttcacttgcttcatgaattccacctgcttcacgttcagcagcatatccttcacttgcctacgggcaaactcatagggttcctgctctcccaccgggcgataatcgctcacattcaggaaataatggaaagctgtatccttcagctctacatggcgattcttgtccagatactcgtccacatcagaaaccttcaagggcagcatatccagtacttccgatacctgcacccatttatcataaaaatactcatacttcacagcattctgcagactgtacttttccagatgttccaccgcctcacgggtttccatcttgtaccagcgacgaacattgcccagctgtggggctgtcaaaggaactttgatgaacaagcctttcatcaacggacgttccactttgaagagcgcctgattcttctcgtaatactccgtcaagtcttgttctgaaatctcctctgatagtcgctgatgtattaaagcctgctgataggtatgcattatcaatgctttgcgataattctccacaagtttatcaatctcaccgttattgggaatattgctctgcgctttatcgtacaacaaaatatcttccacccaattacggatataatgttctgcaaacaacagactgtcgtctttggacaaaccggtcggaagtaccgattgcaaatcttcccggtaaaggaaattgccgtccaactccactaacggtgtccgccctttatggtcgtgccgctcgctgcacgccgcacagagaaggaaaattaaaagcccaaagcaggttgttcgcatcaccaactgatatttacttcgttttgaggtacgaagatagtgttttaatcggttgcatcagtgattattaacggtttttaaaacctcttggtcaatttcaaccttaccggcagcacgcaactttgccacccaatgcgtttccaaatagttccgataagcggttacgagcggctctcgcacctcttgccaactgtccggtcccttctgcttacgaccttgtacagcagtaaagggaaatgacaaaaccggagtcgcatccttccttttaaacaccaaatcatccacatatgcattatcaccgggggcaaataatccttgctctgcctgcaccttgggagtatcgccggcattgaaagtgagacggatggcatccatccactcctcttccggaatcagtttcagaaatttccgtacttgcttcgccactcgcttggtagtacaatgcagcacaatacccctataacgcggttcgtcccaatggaagtccgaacggtgcgcctcaaaatatgctttcaatcccgcttcatccaccacactcctctttcccacttcacggtcagtgatttcggcaagcaacatgctgtcacgatgcccctgcaccaacgcacaaaattcgggatgcttccattccagacgggagttttcatagtccagaatcgtttttactgtaaaagcctccaactgtctgcgcatccctgccggataagcagcggcaaatccgacaaattcttttccaccgtatgccttgccatccaatgtaaacaatgtacgggaagtgcttcctttagccagcagttcgtcgataccggctttatccggcatatagtgatactctttcttcagtttctccacaaaagcccgcgttcctttatccattccatgacgacgggtttgacaacggatgattttgtccttcatcctctcaaaaggaaggatttcctgctgttcgagtactttcacgatatgaatgccctgaggagtgaggaacggacgagaaatctctccggcattcaacccgaatacaatatcctcaaactccgccggcatctgcagccaacccacccaaaacgctttcttctcatcggaaaattgctcgacgcaagcatcgaaagacggcgtactttctccttcctttgcaagagccctatagatagaatccatcctaaactccacctcacgcaaggtatgaccggaaatattctgggggagatatttaaaaatatgcttcacatatacccgacctgcacgccggtcggatttcatcttgtcatagtactgccgtgccgcctgctctgccgtcttctcatctgtcaggtatgatttaatcagacaacggcgatattcatcctgctccttctgaaagacacaggaagtatccaatcccgcaacttcggcagcctctattttcagcctgaagtctataaacttattcacatatacatccaatgccttccgacctgcaccgacagaggtaccgtccttattatagctacgttcgaattcagaacggaggacctcctttccattgatacgcatcaataccggatcgtcctgagccgaaacagccaatccgaacccaaggaagacaaacacccaaagcaatctaaccataagcaccatccgttctttttatacggctgcaaatataaacaaaatgcccggaaagcggcaatctctctccgggcattcactattattttgttattatcttactcaggacggctatagttcggagcctcactggttatagatacatcgtgcggatgactttcgagtacacctgcattagtaatgcgggtaaacttggcatcgtgcagtttctctatattggctgcaccgcaatatcccataccggcacgcagaccgccaaccaactgataaatcacctcatacaaagtgcctttataaggaacgcgggcggcaatgccctccggaaccaatttcttcacatcactggtaccgctttggaagtagcggtccttggaaccattttccatagcttccagcgatcccataccccgataagacttgaacttacgaccgttaaaaataatcgtatcgcccggagactcttccgttccggcaaccagcgaaccgatcatcacgctgtaaccaccggcagccaacgccttcactacgtcgcccgaataacgcaaaccgccatcagcaatcaaaggaatacccgtgcccttcagtgcctttgccacatcataaacggcagacaactggggaacccccacaccggcaactacacgggtagtacagatggaacccggaccgatgcccacctttactccatcagcaccagcctcgaccaatgccttcgcagcttcaccggtagcaatattaccaacaacaatgtcaatatgagggaaatgttctttggcctctttcaatttttcaataacccctttagaatgtccgtgagccgtatcaatgacaatggcatccgcccctgcatccaccaaagcccgcatgcgctccaaagtgtcattcgtcactcccactccggcagcaacgcgcagacgacctttgctatccttgcacgccataggtttatcctttgccttggtaatatccttataggtaatcagacctaccaatttgttgtctttatccactaccggcaacttctcgattctatgttcttgcagaatttgagaaacagcctccatatccgtcgtaggattggtagtaatgatgttctccttggtcatcacctcgtcgatacgcttattcatatctttctcaaaacgaaggtcacgattggtaacaatacctaccaaatatctttcatcatctaccaccggaataccaccaatcttgtattcagccatcaaagccagcgcatcagccaccgtagaacctctcttgatagttaccgggtcataaatcataccgttttcggcacgcttcacaatagctacctgacgtgcctgctcctcaatggacatattcttatgaataactccgataccaccttcacgggcaatggcaatagccatcttcgcttcggtaaccgtatccatggcagcagttacaaacgggatttttaactcaatgtttcgtgaaaacttagtcgagagttcgacagttttgggcaagacttcagaataagcggggattaacagtacgtcgtcataagttaatccatccattacaatcttatcagcaataaatgacatagggctatgcgtttaaaatttattgcgtgcaaatatacggtttttattccattccgtatacttgcacgcaacatttttttcttttttatcaactaaagccaatcaatttgccatctctgaaataaacttgatgcgtaccaaacgtacctcttcttccgtaaagtcatcacccaattcatccagagcatcgtcaatcttatcagtggtagattccttgaaataatcatagatatccagcaagtggtcttcatccataatatcctccaagaaatagtcaatattcaatttcgttccggagtaaacgatagcttctatctcatccagtaactcttcaaactcaataccctttgacatggcaatgtcatccaacgccaccttacggtcaatagcctgaatgatggccaccttcatttttgacttattagctacagtacgcacacgcaagtcctcaggacgttcaatctcattctcttcacagtgacgcttaatgagtttgcagaattcctcgccgtagcgttttgcctttccggctcctacacccggtatgttctgcaactcgtccaaagtcaccggatatatggtcgccattgcttccaaagacggatcctggaaaataacataaggaggcacttccaacttcttggacaacttctttcgtaagtccttcaacatggagtacaatgccgggtctaccgcacacgcaccgcctccacgtgcaggtgcttcttcttccacatcctcaaagtcattgtcttccactatcttgaatgatttaggatgtttaaggaacttcctaccgtcatccgtcactttcagcaagccatagttttcgacatccttactcagatagccggcaataagcgcctgacggatcacagcattccacgttttgtcttcttcgcccatgccagagccgaatacttcgagatcttcgtgcagatgcgcctgcacttctgaagtttccttaccttgtattatgtctataatatagtccgctttaaaattttctttcaccgcgagaacagcttcaatcacggtacacaataattcttgagcttccacttgttttttcggatttaaacagttgtcacaattaccacaattttcttccatatattcttcgccgaagtaatgaagcaacgcctttcggcggcatacggaagattcggcatacgcagcagtctccagcagaagctgcttgccaatttcctgctctgctacaggtttgccttgcataaacttctcgagcttctgcaagtctttattggtatagaaagtaatacactgcccttctcctccatctcttccggcacgtccggtctcctgataatatccttccagacttttgggtatatcataatggatgacatagcgcacatccggtttgtcaatccccataccaaaagcaatggtagctacaatcacatcaattttttccatcaggaaatcatcctggttctgtgttcgtgtagccgaatccattccagcatgataggcacgggcattgattccgtttgcctgcaggatttcagcaagttcctccactttcttccgactcaggcaatagataatgcctgacttttcgggattgttcttaatgaacttgatgatgtcccggtctacatttgcagtcttgggacgtacctcataataaagattcgggcggttgaacgatgacttgaacacctgcgcatccaccatacccagattcttctggatgtcatgttgcactttcggtgtggccgtcgcagtcaacgctatcagaggggcttttcctatttcattgataatgggacggatacggcgatactcaggacggaagtcatggccccattcagagatacaatgggcttcgtccacggcatagaacgaaatcttcaccgttttcagaaactccacattctcttccttcgtcagtgattccggagccacatacaacagctttgtcttaccactgagtatgtcagaccgaacctggtctatcgcactcttgtttagggaagaattgatgaagtgggctatcccatcctcttcgctgaagttacgcatcgcatcgacctgattcttcatcaaggcaatcagaggagaaatcacgatacccgtgccctccatcaacaaggacggcagttggtagcacaaagattttccaccaccggtaggcatcaacacgaatgtatcattacccgccaacagattctctatgattgcttcctgatttcctttaaatgtatcgaacccgaagtatttcttcagctggtctgtcaaattaatcttcttccctgccatgattcattaggttgttgtttattgagttaacttttaatagtggtactccgccatgttttcacaaagcaccctaacaaagttataaacaacttcttaaatttcaagcataatccatcgaatatttttcaataaaaagcaaaatagtcggttttaccccgtattaccatctgattcttaagcactttgcagtcgtgccatatttgccttttcaagctggcgcttggcgtagtccaacgtcacaacaaaatgccccttctgttctgacggaatttcgaacatggcatccatcataattgtctccacaatggaacgcaagccgcgggcccccaacttatattctactgctttatccacgatatattcaaatacagcatcttcaaaagtcagcttcacattgtccatctcaaacagtttgatgtattgcttgatgatggaattcttcggttccgtaagaatggagcgcaatgccgcacggtctaacggattcagataagtcagcaccggaaggcggccgataatctcgggaatcagtccgaacgacttcaaatcctgcggagcaatgtactgcatcatgttgctcttatcaatggttgccgtattgcgtacagcactatacccgacaacatgtgtattcagccgctgggcaatcttcttttcaatgccatcaaaagccccaccgcaaatgaacagaatattcttggtattgaccggaatcattttctggtcgggatgtttgcgcccaccctggggaggaacattcaccacagaaccttccagcaatttcagcaatccctgctgcacgccttcaccactcacatcacgcgttatggaaggattatcacccttgcgtgctattttgtctatctcatcaataaacacaatgccttgctctgcctcgggtacgttataatccgccacctggagcagacgcgtcaaaatgctttcaatgtcctcgcctacataacctgcctctgtcagaactgttgcatctacaatagtaaaaggaacacgcagcaacttggcgatagtacgcgccaataacgtctttcccgtaccagtactgcctaccatgatgatgttcgatttttcaatctccacatcatcaccgccgtccttctggagcaggcgtttgtaatggttatacaccgacacagacaagaaacgcttggcatcgtcctgaccaatgacatattggtcgaggaacttctttatttctacgggtttaggaagttctttcagattcagcttcgtggcacttgccttcttgccagcccccaaagcctcttgagtaatttcataagcctgggtggcgcaactgtcgcagatatagccattcatccccgttatgagaaatccgacttcatcttctgtgcggccgcaaaagctacatctatttttattttttcttgaatctgccatattattttttaatcaaaacctcatctaccataccatattctttggcttcctgggctgtcatccagtagtcacggtcagaatccgcccataccttgtcaaagggagtgtgggagtggtcagcgataatagtataaagttctttcttcagcttttggatctcacgtgccgtgatttcaatatccgaagcctgcccctgggcacctcccatcggctggtgtatcatcacccgggagtgggtcaatgcggagcgtttgccttcagcaccggcaaccagcagtacggctgccatacttgcagccatacctgtacagatagtagccacatcactgctgatgaactgcatggtatcataaatacccagaccggcatatactgaaccgcccggcgaattgatatagatggaaatatccttgcccggatccaccgaatccagataaagcaactgagcctgcaaagtattggccgtatagtcatcaacctgcgtaccgaggaagatgatgcggtccatcatcagacgggaaaacacgtccaactgtgttacattgagctggcgttcctcgaggatatagggatttaaatagctggcttgtgatttaatcacatcgtccagtaccaaactgttcataccaagatgcttggtagcgtattttctaaaatcatccatttctttctatttttttaatttataaggatacaaagaaacaaaaaagaacacagagacacaaaaaaacacagagttatagtttgtcaaactctgtgtttctttataaattttagccgtaggctcacattgctcttacgcaaacatcttattgaactcttcagcagaaacattcttgtgctccagttccacctgagacttcaatgctgtagccaatttagattcaaccacacgattaaccaagccttctacactctctttcttcttaagcatttcctttgagtaattctccaggatttcttcaggtacactcatcataccatattgtgcaaactgtgcgcgagtagcttccttagccatgtttgtgatatcttcctgctcaaccttgatatcattggctttcaccagctgttctttaatcaggtgccaagtcagctcttcgatgctcttgtcatagttgtcctctacaaagctttcttccttgtcaggattgttcagacgcataatgcgcttcagtaatgcatccgggaattccaacttgcctactttctcagtcagcatcttacgtgcgtcaatcaagaacttatagtcactgtctgccacgaactggttagcaataacttccttcactttggcacggaattcctcttccgttttcacattgccttcgccaaatacctgatcgaaaatttcctgagtcaagtcacccggaacgaagcgtgtgatttcttctacctggaagctgaaattggatttcacttcgggagcagcttccttgtcaatcttcaataaagaagacaattcggcaacatttccgtcccaagcagtattcgggttgaatacaagcacatcattcacttttgcaccagcaaaaatagctttctgttcatcattcttcatgtacgaaggcatcattacagcgccttccacctgaatgccaccctctttggtattaccttcttcatccagttcagcaagcaaacctttcagcatgtcattgtcctcgtaaacgtctaccttgtcatacttgccgttacgttgagtataagccttgacctggttatccaccatctcgtctgtaacctcaatagtatagtaatctaccttatcttttgcactgacttctgctttaaattccggagccaaagcaatatcaaacaggaattcgaactcttccatagtatcgaaatctatttcctgctgcttgtcttcgttgggcaaaggctcgcccaatatatttaccttattgtcctggatatacttatatactgtttctgaaagcagtttgttcacctcttcggccaatgcagacttaccatacattttcttaaccaggctcataggaaccattcccttacggaaaccgggaatctgtgccttctgacggaagctcttcaacgatttgtctactttttcctgataatctgctttctcaagctttacagtaagcagtgcgcttactttgtcaatgttttgtaatgaaacgttcattctgacaattatttatttgatttatactttgttccatatctcaaatgagcgtgcaaaattagcgttattctttcaattatcaaaagaacattgccgatttatttcagtttaattcttggatagagcggtagaagagcccaacaatcgggctgacaacagaggaagtttactggaaagatactcgaggaaaagacgatgataaaccgaatcgtccggtttctatgaggagaaacgagagttgcccgaagacacgacaatccacaaaaataattaaagaaaaacattgtttatccgaattttatgcgtttctttgtcgcggaatgatggcgcattagtttttcgatttccattacatggtttttacttccgttttcaagaacgcttttgtaaactctctgtcgttgtaatccatttattattcagccttccttccaagagagttttattcattatatttattttatcattttcattatgaacatttatgttggaaaccttaactaccgcgttaaggagaatgacctgcagaaggcaatggaagattacggcacagtatcttctgtaaaatttatcaatgaccgcaccaccggacgtttcagaggcatcgcttttgtagaaatggaagatgacgctgctgcagctaaagctattgccgaactagacggtgctgaattcttcggccgccagatggtagtgaaagaagcaagacctccaaaatattaatcatagagatttaaggagaaatgaaaaagaccactgaatgagtggtctttttttatttctatcaatggcagtattcggatcacttcataaaatccttgcgacgaagcacgaaactgttactcagatacttttcacgcacaatcttattctcggccagctcttcgggcgtaccctggaacagaatctttccttcaaacaacagataagcacgatcggtaatactcagcgtctcctgcacattgtggtcagtaatcaaaatgccgatattcctatccttcaacttccacacaatctgctgaatatcctccactgcaatcgggtctacaccggcaaaaggctcgtccaacataataaatttggggtcaatggccagacaacgggcaatttctgtacggcgccgctcgccacctgacaactggttacccttgttcttccttaccttctgcaagcggaactctgcaatcaggctctccagcttgtctttctgatactccaaaggcttgtcggtcatttccagtacagatgcaatattgtcttccacactcatttgacggaatacggaagcctcctgcgccagataaccgatacccgtctgtgcacgcttgtataccggatatttcgttatatccaaatcattcaagaagatacgtccctcattgggagttatcagccctacggtcatataaaacgaagttgtcttaccggcgccattcggtcccaacaaaccaacaatctccccttgcttcacatcaatagacacatggctcactaccgtacgctttccgtactttttcaccaaatcctctgtacgcagcaccatgctaccttcctcccgtggctctgccccggcagtcaagcctagtccgacctgcagattttccttaacttcctctacattgtcctttatgcctttttcttcttccatactctaaaggttttcgccgcaaatgtagcaaaaataagccgaaatagtgtacatttgcattcaaatacttatatgttatgtttaaagcacttaagacagtgggacaatatatcatactaatggggcgcgtatttgcccgtcccgaacgtatgcgtatgtttttccgccaatatgtcaacgagttggaacagctcggcgtgaactctatcggcatcgtattgctgatatccttcttcatcggagctgtaatcaccatacagataaagttgaacattgagagtcccttcatgccccgttggacagtgggatatgtaacccgtgaaatcatgctgctggaattctcttcctccatcatgtgtctgattctggcaggaaaggtcggatcaaacatcgcctcggagctgggcaccatgcgggtcacccagcagatagacgcccttgaaattatgggtgtcaattctgcaaactaccttatcctaccgaaaattgctgctatggtgacaaccattccactgatggtgacgttcagtatattcgctggtatcataggtgccttctgtacttgctggttcggcggcatcatgtcggcagtagatttagaatacggcttgcagtacatgtttgtcgaatggtttatttggtgcggcatcatcaagtcgctgttctttgcctttatcattgccagtgtatcggcattcttcggttacaccgtcgaaggcggttccatcgaagtgggtaaggcgtccaccgactccgtagtatgcagcagcgtacttatcttattcgccgacctaatattaactcaacttttaatgggatgattgaactgaaaggactttgcaaatcatttgaagaaaaagaggtactgaaagatatcaatgccactttcgagaatggaaagaccaacctgattatagggcagagcggttcgggaaaaaccgtactcatgaaatgtatcgtgggtctgctgacaccagacaaaggagaactgttgtatgaccaccgcaacttcctcgccatgggaaagaaggaaaagaaagcgctccgccgggaaatgggaatgattttccaaagtgccgcgctgtttgattccatgacggtactggacaatgtaatgtttccactgaacatgttcagcaacgataccctgcgcgaccggactcgtcgtgccatgttctgcctggaacgtgtaaacctgattgaagccaaagacaaatttcccggagaaatcagcggcggtatgcagaagcgcgtagccattgcccgtgccattgccctaaatccgcaatacttgttctgtgacgaacctaattcaggacttgaccccaagacctcgcttgtcatcgacgaactgatacaagatataacccgggaatacaatatgactactctcatcaacactcatgacatgaactctgtaatgggcatcggagaaaaaattatctatatttacgaaggacacaaagaatgggaaggcaataaagacgacatcttcacttccaccaacgagcggttgaacagtttcatatttgcatccgacctattccggaaagtcaaagaagtggagatacagaaccttgaaggataaaactgcacctcattttctaacctattacataagaaagcgtccggaaactatattccgaacgctttctcttcataaaaccagttaatagaatcgacttatatcatcacgatatattttacttctgccggatatagatatttatcggagttccggtcaacttccatttctcacgcatcttattttccaagaatcgtctgtaaggctctttcacatattgtggaagatttgcaaaataaacaaatgacggcacctgggtattgggcaactgcgtaatatattttatcttgatatacttacccttaattgaagggggtggatacgcctcaataagcggcagcatttcctcgttcaaacgagctgtcggaatacgcgtcatacgattttcgtacacatcacgcgcctcctccaataccttcagaatacgctgtttggtcagtgccgaagcaaagatgatagggaaatccacaaacggagcgaaacggttgcggatagcatcttcgaaagtcttcatcaccttcacagtcttgtcctgcaccaagtcccacttgtttaccacaaccactagccccttggcattcttctgaatcaaagagaagatattcaaatcctggctttcgatgccacgcgtagcgtctaccatcaaaatacatacatctgcattctcaatggaacgaatggaacggattacagagtagtactccaaatcctcattcaccttgttcttcttacggatacccgccgtatctaccaggtagaaatcaaaaccgaatttattgtagcgggtatagatagaatcgcgcgtggtaccggcaatctccgtcacgatgttgcggtcttctccaataaaggcattgactatggaagactttccggcattcgggcgtcccactactgcaaagcggggaatatcctcgtccagaatttcatcagattcctttttgaacttgctgacgataaggtccatcatatcgcccgtaccgctacccgttacagcagaaatacagtaaggatcacccaaacccaggctataaaactcaggggcattatattgtagttcatgattatcggtcttattggcaaccagcagcacaggcttcttggcacgacgcaagatggcagccacctgctcgtcgaggtctgtaactccgttcatcacatccaccacaaacagaatcacgtcggcttcgtccaccgccatcaatacctgtttacgaatctcttcttcgaaaatatcatcagagttcactacccaaccgccagtatctaccactgagaactcacgtcccaaccattcggtctttccatattggcggtcacgggtggttcccgcttcctcattcacaattgcctgacgtgtcttggtcaggcggttaaataatgtagactttcccacattgggacgtcctacgattgcaactaaatttcccatagctcactctctttgttttttgcgactgtcacagtcgtatgaataactcttaatccaactgataaccaaaattacgcagttctttgtccgaactccgccaatccttatcaactttcacaaacgtctccaggaatatcgttttcccgaaaaacctctccaaatcacggcgcgcttcagtagccactttcttcaaagcctttccttgcttgcctatgataatacctttttgcgaatcacgctccacatagattacggcactgatatgaattttctttgcctcctccttaaactgttctaccatcacctccaccgaataagggatttccttatcatagtacaacagaattttctcacggattatttcggtcacgaagaaacgcgccggcttgtccgtccactggtccttgtcgaaatagggaggagagtcgggtaacagctccttcacccgcttcatgacataatccacattaaatttcgaaatagcagagataggaataatttctgccttcggcagcaattccttccacgcttccaccagttccaccagcttttcctggttggttaaatcaatcttattgataagcagcaataccggaacgtccaactgtcctactttctccacaaaatcattatgcttgtcgggagtctcaaccacatctgtcacatacagcaacacatccgcatccgccaatgccgaagtggagaaattcagcatggactcctgcaacttatagtttggcttcaatacacccggagtgtccgaaaacacaatttgcatgtcatccgtattatagatgcccataatccgatgacgggtggtctgcgccttgaaagtggcgatagaaatacgctcacctaccaaaacattcatcaatgtggacttgcctacattcggatttcctacgatatttacaaaacctgctttgtgcatgacttcagtatttgaattgagacaaaaaaacgcatcgaatcgagataggatgcgtttttatcatattatattcagcaatagcatgttactgcttctttccgtcgtatccccacttcacatacacagctccccaggtaaatcctgcgccgaatgcagtgaaaataaggttgtcgcctttcttcagcttatcttcaaagtcccagatgcaaagaggtaacgtagcagcactagtattgccataacgttcgatattaatcagcactttctcacgaggaacttccagacgatgtgccacagcatcgatgatacgaagattggcctggtgcggaatcacccagtcaatgctatcctttgtcagaccgtttttctcggcaattgccgcgctaacatccgacatattggatacggcatacttaaacacagtacgtccttcctgataaatgtaatgcatgtgattgtctacagtaaaataagagggaggacaaaccgaaccacccgctttcatatgcaggaaaggcaaacctttgccgtcggttctcagaatagcatccataatacctacatcttctgttgtcggctcgagcatgaaagctgcagcgccgtctccaaagataggacaagtagcacgatctgtataatcaaccattgacgacatcttgtcggctcccacaatgataaccttcttatatctaccagaacggataaaattggccgcagtctccatcagatagagaaatccgctgcaggctgcctgcaagtcaaaagcatatgcatttttcagccttagcttatcacacaaaatagaagctgtagaagggaagtggtaatccggagtagaagtagctacaatcaccagatctatatcatccgggtctgcgccagtacgttgcatcagctgtttggcagctttacgcgccatataggaactacctagtccctcttcattcaggatacgtctttcctttactccgatacgagtcataatccattcgtcattggtatccaccattcttgagatttcgtcgtttgtcaagacgtaatcaggtacataaccgccgactcctgtaattactgcatttattttttccattaaaatcttgtttacttatagaactactgaaacaacggtagtctaaaaaggtttgcttattaaattacaaatctttttagacgcccgatattcaagtataagttttagtcaaactgaccgtaattatacggcagcttccttttcaactgcaagcttacctctatagtaaccgcatgcactacatacagtatgatatacatgccactcaccacaattcgggcaaatagccagtgtaggagctactgctttatcatgagttcttctcttcgcagttcttgtttttgactgtcttctcttaggatgtgccattttctttaatctttaattgttatctaatattttctttaattcgtcccaacgcgggtctacctgcgtttcttcttcattcatcagctccacctcttcttccggagcaaatgtatcctcagccatatcatcatccggagtggtgcgcatatgcttactcaatttgctggtcattgccttgttacacttacccggagcatgcacatgcttcatggggatggccaaagctacaaactcgtacataaaccatgctacattaatctcaccttcctcttcgggaattactatgagattgtcaccttcttcggcatattcatgaccgaacttaaccagcagcttatctgtcgagctgacaagctgttccatatcgtccaaacaacggtcacatggcacccacaccattccgtctgtctggaagttcaattcgaaagcacgagatgttttctttacaactaacaccacattgactttacccttctgcacttccggtccatcaatattggcaaagaaaaggttgtctagcacaaactcatatttgcatgaatctgcttgcatacctttcaggtctattttgtatttatcaaactttcccaaagcttcttttgtttattcgggcgacaaagatacgaataattatcctcattatgtagtatttagagtaaaatattcatttttttatgttcatttcacccagatatcactacaaatcagcagaaaactcatgaactaaaacacaagaacaatccataccagcatccaagtatatgtaaagaaaacgaactaagcgtttttaatcattcatttagtaccttaattcgggaattaatctgatgaacatgcgatgaataattatatataataaggtatagtgattagcggtagaaacggaatgttagaggagatatatgtaaacgaacgaagcctccgtatccttatcagacacggaggcttcttctgaaaaacggcgactacctactctcccactgttacgcagtaccatcggcgtgaccgggcttaacttctctgttcggaatgggaagaggtggaaccccggtgctgtagtcacctgaataaggtagacatgatgcgaaaaaagcaaagcattcatttatggctgaacgtatatacctccatacaaggcaaggcaaaaagtgaacgggcaattagtaacgctcggctatgacatcgctgcctgtacacctgcgtcctatcaacgttgtagtctacaacgaccctgagaaatctaatcttgtggctggcttcgtacttagatgctttcagcacttatccaatcccgacttagatacccggcaatgcacctggcggcacaaccggtaaaccagaggtcagtccaacacggtcctctcgtactagtgtcagagccacgcaaatttcatgcgcccacgatagatagagaccgaactgtctcacgacgttctgaacccagctcgcgtgccactttaatgggcgaacagcccaacccttgggaccttctccagccccaggatgtgacgagccgacatcgaggtgccaaacccctccgtcgatatgagctcttgggagggatcagcctgttatccccggagtaccttttatcctttgagcgatgtcctttccatacagaaacaccggatcactatgctctagtttcctacctgatcgacttgtgagtctcccagtcaagcgcccttatgccattacactctgccgacggttaccaatcgtcgtgagggcacctttagaagcctccgttacgcttttggaggcgaccaccccagtcaaactacccaccaaacagtgtccccgcaacagcgggttagaactcaaataatcaaagggccgtatttcaacagcggctccacgaacactggcgtgcccgcttcaaagcctccggcctatcctacacatcaattacccaaattcaatgttaagctatagtaaaggttcacggggtcttttcgtcccatcgcgggtaatcggcatcttcaccgatactacaatttcactgagctcacggttgagacagcgtccagatcattacaccattcgtgcaggtcggaacttacccgacaaggaatttcgctaccttaggaccgttatagttacggccgccgtttactggggcttcaattcaacgcttctcttgcgatgacgtctcctcttaaccttccagcaccgggcaggtgtcaggctgtatacttcatctttcaattttgcacagccctgtgtttttgttaaacagttgcctggacctattctctgcgcctcaattgcttgaggaccctttatcccgaagttacagggtcagtttgcctagttccttaaccgtgaatcactcaagcgccttagtatattcaacccgactacgtgtgtccgtttgcggtacgggtaccgtaaggattaagtttagcggattttcttggaagtatgattacacgcactattggattgtccagaaggacgctccatactgtcaggttcgactctcgttccggatttgcctagaacaatcaacatctacacccttcaacggactattccgtcagtccgcggcgctgtcacgactccgtctccacgtcactccttaaggtagtaccggaatattaaccggttctgccatcggcctcgccgttcggctgagccttaggacccgacttaccctgatccgattagcgttgatcaggaaaccttagtctttcggcgagggggtttcccaccccctttatcgttacttatacctacatttgcttttccacacgctccagcaaggctcacgccttaccttcgacgcagagtggaatgctcccctaccgatgatttctcatcccaaagcttcggtagaatacttatgcccgattattatccacgccaaactcctcgactagtgagctgttacgcactctttaaatgaatggctgcttccaagccaacatcctagctgtcttagcaatctgacttcgttagttcaacttagtattcatttcgggaccttagctgttggtccggattgttctcctttaggacatggaccttagcacccatgccctcactcctgacatagaactgacacgcattcggagtttgtcaagacttgataggcggtgaagccctcgcatcttatcagtcgctctacctcatgtcagtataagtcaaggctgcacctaaatgcatttcggggagtacgagctatctccaagtttgattagcctttcacccccaccctcaggtcatccagaagcttttcaacgcttattggttcggtcctccagatggtgttacccatccttcaacctgcccaagggtagatcacttggtttcgcgtctactccttccgactatacgccctgttcagactcgctttcgcttcggctgcggatctgagatccttaacctcgccggaaaaagtaactcgtaggttcattatgcaaaaggcacgccgtcacactaaaagtgctccgaccgcttgtaggcacatggtttcaggaactatttcactcttctgttcgaagtgcttttcacctttccttcacagtactggttcactatcggtctctcgggagtatttagccttaccggatggtcccggcagattcacgcagaattcctcgtgctccgcgctactcaggataccactaggcttcggttggcttcgcatacgcagctatcatgctctatggctgtactttccagaacattctgctcaccaactttcttgccacaacgtggtcctacaaccccacacatgccgtaacatggatggtttgggctgttccccgttcgctcgccactactgggggaatcattatttattttcttttcctgcaggtactaagatgtttcagttccctgcgttagcctcccgcattgcgggatgatatcccttcaggatatcgggttgtcccattcggaaatccgcggatcaaaggtcatttgcacctacccgcggcttatcgcagcttatcacgtccttcatcgcctccgagagccaaggcatccgccatgtgcccttacttactttttgtcttaccgatcacgtatggtcgatatatactttcagctttcaactttactttttttggtcacatcatgtcaaagatcgttgtcaaggattaaggattaaagataattcctaatcttgagaagtggagaataacggattcgaaccgttgaccccctgcgtgcaaagcaggtgctctagccagctgagctaatcccccttcaccattgatgaaagacccgctaaatcgtaaccggtcggtcaccaactgagaagtagtcccaggcagagttgaactgccgacctctacattatcagtgtagcgctctaaccaactgagctataggactgtcagtcaaaccctcgccttacggctcggcttctacttttctcgtatattttaataaacaagtacgcgcagtacaagaggttcttatggaagcataacttcaagaaccaacgatcgagtcgagacgtcactccagaaaggaggtgttccagccgcaccttccggtacggctaccttgttacgacttagccccaatcaccagttttaccctagggcgctcctcgcggttacgcacttcaggtacccccggctttcatggcttgacgggcggtgtgtacaaggcccgggaacgtattcaccgcgccgtggctgatgcgcgattactagcgaatccagcttcatggagtcgggttgcagactccaatccgaactgagagaggttttagggattagcatcacgtcgccgtgtagctgccttctgtaccccccattgtaacacgtgtgtagccccggacgtaagggccgtgctgatttgacgtcatccccaccttcctcacatcttacgacggcagtctcgacagagtccccagcataacctgatggtaactatcgataagggttgcgctcgttatggcacttaagccgacacctcacggcacgagctgacgacaaccatgcagcaccttcacaaatgccttgcggctgatctgtttccagaacattcatttgcaatttaagcccgggtaaggttcctcgcgtatcatcgaattaaaccacatgttcctccgcttgtgcgggcccccgtcaattcctttgagtttcaccgttgccggcgtactccccaggtggaatacttaacgctttcgcttggccgcttactgtatatcgcaaacagcgagtattcatcgtttactgtgtggactaccagggtatctaatcctgtttgatacccacactttcgagcatcagcgtcagttacagtccagcaagctgccttcgcaatcggagttcttcgtgatatctaagcatttcaccgctacaccacgaattccgcctgcctctactgtactcaagacacccagtatcaactgcaattttacggttgagccgcaaactttcacaactgacttaagcatccgcctacgctccctttaaacccaataaatccggataacgctcggatcctccgtattaccgcggctgctggcacggagttagccgatccttattcatacggtacatacaaaaaggcacacgtgcctaactttattcccgtataaaagaagtttacaacccatagggcagtcatccttcacgctacttggctggttcagactctcgtccattgaccaatattcctcactgctgcctcccgtaggagtttggaccgtgtctcagttccaatgtgggggaccttcctctcagaacccctatccatcgatggcttggtgggccgttaccccgccaacaacctaatggaacgcatccccatcaatgaccgaaattctttaatagctgaaagatgcctttcagatataccatcgggtattaatctttctttcgaaaggctatccccgagtcatcggcaggttggatacgtgttactcacccgtgcgccggtcgccagcaaagaaagcaagctttcttcctgatgcccctcgacttgcatgtgttaagcctgtagctagcgttcatcctgagccaggatcaaactcttcattgtaaaagtatcgtgactgcgcaaattaaaaaaaattaatgtgcgacagcttgttatctgttcaggacgctcgaattcaaaagtttatctttacctatataaaataagtattgacggttctcttgttttacccaaggcaattccccattgataaggaaaagccttgctcttgtactacttgtattgtttatgtaaatctgttcaaagatcgctcgtttcacgattgctgttcttttcagaaagcggatgcaaaggtaagaacttttaagtatatcctccaaatattttcggaagttttttttctttttttctctcttttctctttcctcgtcgtctctcttgtcgaaagggaggcaaaaagaaaaaggaagaagaaccaggcaccgtttcttttaaaagaatgtcaactcgcgctgctttcattttcaaaagcgggtgcaaaggtaagaactttaaagcataacttccaaatattttcagaagttttttttcatttttcttttccaaggccgaagttccagaagaaaccgatgacaaagaagagaaaaatggaagcttaccgctccgttttactgtcagaatgtcaaaacatcgccgccttcgttcccgaaagcggatgcaaaagtaggccttttatgaacatctgcaaaatttatacacggtttttttgagagattccatgaactttttcataactcactgattgatagatatgttttaaagcatgttttttaaagaaaactgggataaggaaaggaagggacacattatatatatacgcgcgcgaaatacaagctccaattcataccttgacatagaccactgaacggccggcaccgcgcttgcgaatcacaaagagaactgacaataaacctgcgaaaggctacatccggaaagcacggaaactaaacgggaactaatgaacaacttttctcaccacagatatgttgctttctttccacacccgtgtttctttcttaccacagctgtggtaagaaagaaacacgggtgtggaaggattagttcttagggaaaaataaggtggtacatcgcagtttgtatcctaattcttagctaccatctatacgtcatacagcgacaatcagtagaagcctttatcaagtccacttctgtgccttacccaaagaacgcacagcggcagcaaactcttcccgaggaatgatagccttattacgtgtcttcaaacgattattataaacggtctgaggtgaataatgcaagaattcggcaatcttcacactatcagtgatacctaaacgcaccaaagcataaatgcgcaattccgtattcagcaactcaccatcttttagcacaatctgctcgtcaggatggagcaaggcattgaagtcacttacaaaatccggataaatgtgcaagaagatagcatcaaagttatgatagaactctttcagctcattctgtgccatagaatgagtatcggttaatgctttcacatcctccaactgatttgccttaagcttacgattgatatttttccgatactcatccagcttgctgatataattggaacaaatggaaaaaacataacctatgtattcctccttcacatagttggattcacgaagctgattattggtatctctcagctgttcattcaaagaagtaagctgtacattcgtttctgccacttgtccgtgcattttcgaaagttcttccacatgcttattcaagcggttgtttgcctcattcagctgttggcgcgactgcttcaaccgcttcatctgcttatatatatacagaaaagcaaacaaggatatcaaggacaagacactgaccaataccaaatacatacgtaaccgcgcttcttgcttctgattacgttcctgataaatctgatgaatggtgtcctgcaccgcagagatgcctactactctcacccggttccgatatgccaaggcattctgcaagcagtaactcatgtagacataggcatggtcaatatcacccaaactaaaaagcacccccgccagctcttccagcgaagcaatatctttattggagatacgtacatcggccatagcagaatatatcaggtaagtcagataattttcttgctcatcggactcgcgataaaagcaagccagcacgtaagcattcatggcatcacgccgagtatcgaatgcagaattaaagattcccttctgcaaacgctccttaaaaacatacatactgtccgtaccttgcactacctgccccttataccacaagaacaagggatgttcaggggtaagaaccatattcaaggagtctttgtaaacacgttccaactgtgcataatgttcatgcaaagtggccatttcactaccggtatactgattgaaatgcgaatacagatacagcatttgtccataatagtccactaacaattctttggggagcgaaccgcctgaaactccgcgcaattcatcctgggcttctttcaacaaaccggtggcagccaacagaaaagacttttttatcttccactccatctgccggtatttatcattctgcctataaactatatccaaattatctaccacataattcattgcagaatcggcattatagacacaatactcatcataaagatttttattcagccaatatctctcctccaaagtacgcacatccttttgaagcttgtgcaactgagcaatcttcgcctctttaagcataacaaacgtgtttttctgcgcaatcagagagtcaaggcgtaccagtagttcttttatcttttcactgtaaggtgccgcattcaggaaagtacaccccaccagcaaaaacagcaaagctatgatttttcttttcatttctattatttacataaagcagagagcacaaagataaattaatctatctaaagataagctacttctaccctaaaaaagtacactaaaattaagagctatttcgatcgtttgaagtaataacacagtatgtccaaacctacttccatagtagcaaacctttactttacccactaaccacaaacattataatacactgattttatgatatttaaattttatacagacttacttccacacattacccacctatcagacaaatagggttgtccactatctttgcaaacagaaaggaaagtgtactatggaaaaacaactaatccctattagaacatacttttctaaataaatcaaatcttttaataaaagtactatgagaatgattacaagaaatcttcttacgcggagttacaagctccttctgacattactcgtactgctaatgtcaacaaatgcatttgcccaacgattgacagctacgggtaaagtagtagataccgcaggcctggaggtcatcggcgcatctgtattggaaaagggaacaacaaacggtgttgtcaccaatctagacggagagttttccctaagtgtagaacaaaatgccacactggtaatatctttcatcggctataaaacgatggaggtaaaagcaaccaccaacatgaatgtcacattgcaggaagacaacgaactgctggacgaagtggtagtcatcggctatggaagtgtaaaacgcaaagacgtaaccactgccgtatctacggtttctacaaaggatttggatcagcgccccattgtatcggccgcccaagccctacaaggcaaagcagccggtgtgtcggttatgcagcccagcggcgaaccgggcggtggtatgagtatccgtgtacgtggtaccacctcattcaatggtagcaacgacccgctctacgtagtggatggtgtacctgtagacaatatcaacttcttatcacccaatgatatcgaaagcctctctatcttaaaggacgcttcatcggcagccatctatggttcacgtgcagccaacggtgtagtactaattacgaccaaagccggagcagaaggcaatgccaaagtagcactgaacgtacaatatggtatgacgaaagtggccaaaagcatggaggctttgaatacagagcaataccgtgaattacagaaagagattggcgccgtcaatcccgctgaccttgaaggtttaacagaccaaacagactggtttgacgaggtttacaaaaccggacaaactcagaactatcaagtgtccgtgtctaacggaaacgaaaagatgaaatacttcctctctgccggttatctggatgaaaaaggaattttggaaggtacgtacttcaaacgatacagcttccgtgccaatatcgacaaccaaatacgcagttggctgaatgtaagtgccaatatctcctactccgataacatcggaaacaccggcatcatttccggaacaggtgccaaccgtggaggtgtagtcctttcagttatcaatacaccgacctatgctcctatttgggaccctgaaaagccgaatcaatacaataagaacttctatggggtaaatatcatgaacccgatggaaaacctagcccgccagaaaaacaacaaaaacaaggaaaaccgcctcatcgcatccggagccgctaccatcagcttcctgcccaacctgaagttgaaatcatctgtagcactggaccgccgcaacggtgtaagcactacatttctcgatccaatatcaactaccgacggacgcaacagtttcggaacagcctctgacaaccgaaacatgaataccgtattggttttcgataatgtattgacttacaacaccaacatcaagaaacatggcatcgacgtcatggcaggttcttcctacaccaaatcagactataccaacagctatattaatggttcacacttccgggacgataaaatacacactctgaatgccgccaataaaatttcatgggacggtaccggatcaggagcctcacagtgggctatctcttcctattttgcccgtgtgtcctacaattatgacagcaagtacatgcttaccatgaacatgcgtgccgacggttcatccaagctgcatcccgaccatcgctggggcattttcccctccttctcggctgcctggcgtatttcgtcagagaaattcatgaaagacattacttggattgatgacttgaagcttcgcggcggctggggacagaccggtaaccaaagcggcataggtgattactcatatctgcaacgctacaacatcaaccgcataccgtggtttgaagaaggcaacgaccatgcagttcccggtatcagccaagccaaccttagaacaagtgacctgaaatgggaaaccaccagccaaaccaacatcggtcttgacttaactgtgctgaacaatagactgaccttcagcatggattactattacaagaagacaacagacatgttgatgaatgtaagtctgcctgcaggtgcagcagcaactaccagcatcacccgtaatgaaggcgagatgaccaataaaggatttgaattctcactcaattctcacaacctgaccggcgaattctcttgggacacagacttcaacatatctttcaacaagaacaagctgactaagctatcattacaaaaagtctatacagcagcaagcagtgccgaggtagtaaaggaaaacatcgtacgcaatgaaccgggacgtcctttgggtggcttctacggctacatcagtgacggtgtagatcccgaaaccggtaacctgatttatcgcgacctcaacgaagacggcaaaatttccacttctgaccgtacctatatcggcgatccgaatcccgacttcatctacggattgacgaacacttttacttggaaagaccttagtctgagcatcttcattcaaggaagctacggaaacgacatcttcaatgtgtcccgcatggaaaccgaaggtatgtatgacggtaaaaaccaatcaacagaagttttgaaacgatggaggattcccggacagattaccagtgttccgagagccaacttcaacatcaagaactccacttactttgtagaagatggcagttatctgcgtgtcaaagacatctcactctcttacaacatccgttgccgccagtttaagaaatggggtatcagccgcgtacaaccctacttcactgcaagcaatttgctaacctggaccagttattccggtatggaccctgaagtaaaccaatatggcaacagcggttccgtacaaggtatcgactatggaacctatccacagagtaaagcattcgttttcggtatcaatgttgaattctaaaaaaaagaagaaataacttatgaaatcaaagcatatatataaaagtatagcttgcggtgtactgttggcactaaccgcaacctcatgtgatctggactataatccggtagacagctactcggatgtaacggaaggagtggacaaaacagatgaaaaacctattttcaacagtgtgcaagatgtggaaacctcaatggtaacccttcataaaaaattccgcgaccagcaggagcactggtatgtcgacaaactgcttatcggtgacgcccactccgacaatgcatacgccggaacaacgggtgcagaagtagtaccttatgaaaccaattccattgaaggatctaattccgtactaaaacgtgactgggaccgttttctgggtgatattgccgaagccaaccgtatcatcgtaggctgtgagcaactcaaggccctcagcgacagtgaacgtggcaaatatcaatcacaagccaagatattccgtgccatggtaatgttcgatatggtacgtttatgggggaatttccctgtcatcactaccgtgggtggtgacatcaccgaagacaacgtagaagagatgtacccgacctactttcctccacagaatacagctgaagaggcttatgcccaaatagaaaaagacttgactgaagctgtggaaaaccccaacacaccgacaaacgatgcatccgacaagagcatacttaccaaatcggtggcacgtgccatgcttgccaaagtctatgcagaaaagcctctgcgcgattatgcaaaagttatcaaatatgccgacgaattggctgccgacggcttcgaccttgtagaagacttcagcgacctttgggcttatgatacagaaaaaaaagactgccgggtacgcaatactaaagaagctattctcgaagctcattttcctcctggttcagggaactggtgtacgtggatgtttggccgcaacttaagcaactgggatgaaagctttacctgggccaaatggattactccttcccgcgaccttatccgcctctatgaggagcaaggagacacgaaacgctacaatgagtctgttgtatggtatgagtgcggatggagcaactattatccggcagaccattatgctttcatgtacaaatgccgctctgctttcaacagtatcatttatctgagatatgccgacatcctacttcttaaggctgaagccaaaattatgggagaaactcccgacttgaacggtgcagccgacattattgaccgcatccgtaaccgtgccggactgggtaaacttccacaaagcacccgtagcagtaaagaagcattgctccaagcttatatggacgaacgccgtatggaacttgcttttgagggacaacgctggtacgacctttgccgcctcaataaggtagaagaagtgatgaacgccgtttatgccaaagacagtggccgccttgcacaagagaatttgtttaatgaaaactcttatctactcgcaatccctcagggagccattgaccagaatgagaatttggtacagaatccaggctattaacaataaaaagtaatataaaaatcaatagaatatgaatttgaaaaatatattcactaccgcattaggctgcttcgctgtattggcagcctgcggcaatgataatgacagtgacgtcactcctacaccagaccaacctacagaagaggcaaaagatgttactatctatgtgacgaacaccagccgtacttacgacttgaaaaagtctggactggccttcggcaccggaagcaacatgtcaccttctaccgtgacactcgaccccaccacccgttatcaggaaatggacggttttggcgcagccattactggctctaccagttacaacctgatgcaaatgacacaagagaaccgcacgaagtttctgactgagacattctcggataaagaaggctacggcttcagctatgtacgtattgccatcggttgttccgacttctcattcagtgaatttacttgctgtgacgaaaagggacttgagcactttgcccttccgatggaagacaccaagtatgtaattcctatattgaaggaaattctagcaatcaatcctactgtcaaagtgattgctgctccatggacatgtccgaagtggatgaaagtgaaaagcctggaagaacgtgtaccctttgactcatggaccagcggacacttgaaccccgaatattacagaacgtatggcgaatatttcgtaaaatggatacaagctttcgaaaaggaaggtatcaaaatccacgctgtgactccgcagaacgaaccgctgaaccacggtaactcagcatccttgtttatgggatgggaagaagcccgtgacttcatcaagaccggcctgggtcccgctttcaaagaagccggagttgccacaaagatttatgttttcgaccataactataactacgacaatctggccgatcaaaaaagttaccccaccaagatttatgatgatgcggaagcctcacagtacattgcaggtgctgcctaccacaattatggcggtaaccgttccgaactgctgaacatccataagctttaccccaacaaggaattgcttttcacagaaacatccatcggcacctggaactccggccgcgatttagaagcacgtctgcttaacgatatggaagaaatagcattggggacagccaacaactggtgccgcggtgctattgtgtggaacctgatgttagacagtgacctgggaccggtaagcccttcagacggttcttgcaagacctgctacggtgcagtagatatcgacaatacaaactattctaaaattgtccgcaattcccattattaccttatcggccacatgtcttcagtcgtgaaaccaggtgctgtacgtatcggaacgactggttacactgccaatggggtcacctactcggcctttgaaaacactgacggcacctatgccttcgtattggcaaacaacaatgcagatgccaaacgaattactgtaagtgacggcactcactacttctcctacgaagtaccggctaaagcagtcgtttcttatcgttggaaaaaataagactaacaaattaaacagaagattataatgaaaaactttaaatactatctgatggcattggcaagcatagccatgctgaatgcctgcagcgatgacgatccggttcccggcaacccgacaatggactttcaggcagaaccttcttcagccttgttcggcgacagtctgccttttacaatcaaagcttcggacgcagatgtacctctttctacactgaaagcacagttatacttcagtgacgaaatggtttccgaaactgtaatccgtaccaaagttagcggacaagagtataacgggaaaatatatgttccctatctggcaaacattcccaacggaacagctacactgaagtttatcctgcagaacatcaactttacgattacagaaaaaagctacgacgtggcgctgagtcgtccggacttcccctacctgactctgatttccggagaccaagaataccgcatggaaaaagtcgcagccaatcagtatagtgtgaccagtgaatttgcacaaaaagtgaaaggttacatcaaagctcctaaagtaggcgccaacggcaatgaaatcaatttcggatggagtaacggtgccatcacacaaggtacttccagtgagattactttctccagtctgtcagccgggaagtattccatctccttcaacacgctgacttatgcggccgcccctttcgtgaaattgttactgaacggctctgaaatggaaatggtggatgataaccattacagcatcgacctcaacctgaaacaaggggacaacatcaccgcagatattcccaacttcaaccagtactggatagatcccgacttcttcaaaaagaatgaagacggttcactgaaatttttacccatcgacggaacttaccgtatcattgccaatctggacctaaattatttggaagtattgaaaatgaacggaacaagtaccgatacactgaacgatgacggaaccggtgccctttggattatcggtgatggcatcggtaagccctcagtagcaaccaatgccgtaggttggaccacagagaaagggctctgcatgtcacagattgaagcaaagaaatatcaggtgacggtagtagcgggagagcaaatcaaatcagatgacatcaacttcaagttcttccaccagcaaggttggggaggtgaatataaaaacgatgccttgtctaccaccagtgacctagtatttataggtgacggtaccaatggacgtgatgccggcaacttgggactcgtaaaaggcaaaagtttggaaaacggtgttgcttaccggttcactgttgacgtaacggcaggtatctcttcggcagttctgacagtagaaaaggtaaaaagatagacggataacgcagaagattaactaaatgagaaaggggctggctctataaaagagttcagcccctcttgtttatgcagaatatatgttccggatttagcttaaaccttctttcgcctcctcttgtggaatacgtaccgaagtgtaaagctcaagaatggcggctatcgtcagagacacaatccattcattgccccttgtaaagagcatgaatgcccccgtaagcaccagcaaaagtgcaccgaatatttgctgccgacgcaggcgtttgacggtgggacttttacacttggacggagaattgatttgtgccaaagcaaccatcgtagcaccgacagtatatatataaggtgaaagaggccagcccgtaatataaacggcagctccagccaggagcatcacggcccctactgcaaaaagggcgggtatcagttgtttcattcttctatatcttcttcaaatacataaatatcctcattgggctttttcatcagatacttctcacgggcaatccgttcgatggcaccggagtcgacggcaagttcattgagccgttcggtattctcctcgtattccttgcggtacttttctatttcatcgcgcagacgactttcttcccgggcgtaacccaaacggcgtacaacactgttctcatccaggaacccgataattacagcaaacaacgcaagcgtaatcaaatatttatgcttgcggacaaaagaccagagagaagcaagtttatccatctcgttatctactatttagcaatttatcattcatgatggaacttgcccatcatataacttcacgtcacaaagataagaggaataaccgaaagatttcttttttttgtgtacatttgcacaaaaagcaaagaatatcccgaatatggaaaactatatcgtatctgcacggaaatatcgtccctcgacctttgagtctgtggtaggccaacgtgcactgaccactaccttgaagaacgccattgccaccggaaaattggcgcatgcctatcttttttgcggtccgagaggcgtgggaaaaacgacctgtgcccgtatctttgctaaaacaatcaactgcatgagtcccacagcagacggtgaagcatgcaaccagtgtgaatcctgcactgccttcaatgagcaacgctcctacaatatccatgaactggatgccgcctcaaacaactctgtagatgacatccgccaattggtggagcaggtacgcataccacctcagataggtaaatacaaagtatatatcattgacgaggtacatatgctgtccgcctcggctttcaatgctttcctgaaaacactggaagagcctccacgccatgccatattcatccttgccactaccgagaagcacaagatactgcccaccatcctttcacgctgccaaatatatgatttcagccggattggtgtggaagataccgtagcacacctcgcatatgtcgcctccaaagaaggtatcactgctgaaccggaagcgttgaatgtcattgccctcaaagcagacggcggtatgcgcgacgcactatccatcttcgaccaggtggtaagcttcaccggaggacacatcacctataagagcgtgattgaaaacctcaatgtgctggactatgaatactacttcaaactaaccggattctttcttgagaacaaaatcagtgacgcgttgctattactgaatgatgtgctcaacaaaggcttcgacggcagccacttcatcaccggactttcatcccacctgcgcgacttgcttgtcagcaaagacccggcgacactgccgttgcttgaagtgggcgcaagcatccgcgaacgttaccaagcacaagcacagcaatgccccctcccttttctttaccgtgccatgaagctctgcaacgattgtgacctgaactaccgtgccagtaaaaacaaacggctactggtagagcttactctgatacaagtggcacaactgaccgccgaggaggacgacggtaccaatgggcgcagccctaaacaagctataaaacccatattcacgcagcctgccgccgttcagcagccacaagccactgctgccatgccccaacaaactgtacagccggcagtacaaccaaacagaactcctcaacctgctgctacgcagcatggcaatactacaactccacatgctacacctgctgccatattaatggcacaagggagagaagagaaaaaaattccggtcatgaaaatgtccggattaggggtatccatcaaacgcccccatatagaagaggaacaaagaaacccttcatccaactctactgccgcccaccaagcagcacaaccagaagaggactacatcttcaatgaaagggatttgaactattactggcaggagtatgccggacgtatgcccaaggagcaagtagccatagccaagcgcatgcagaacatgcgcatcactttaataaatgacacaacttttgaggctgtagtagacaatgaaatcattgccaaggaatttaccggcatgatacccactctgcaaaattacctacgtacccggctaaagaaccgcaaagtcaccatgactgtccggattagtgctcctactgaaaaggtacgtgcctacggacgcgttgaaaaattccagatgatggcacaaaagaacagtgccctactacaactaaaagaagagtttggtttggaactgtattaattccttccaatcgactgcataaagttgctaacaaattgagtataaaggagaaaaaagcatctatttaattttttatttactcatttatatttatttttgccaataataaacaaaagaggcaaacaaacatttgagaacaaaaatgattatatggatgctattggggcagctattgtatacttctgtcttatcagcacatacaatagccaatcaagaaaagcagagtattctgcaatcattggtcaaaagacaagttctctatgatgactccatatccatagacagcgtcattacgtggagtgagcaacttctttccaccctacaatcaaatgaagatagaacgacgtattttctattacaacttcaattggccaatgcctacacattgcgcggcgatatcagcttagcaacgaaccgggcacaacttatgtacgaagaagccaaagctacagactaccaatttggtatggtagtggccaaccaggccattggagacgcctataacacaatagccaacatgggggataaagccctggaatcataccaggatgctttgactgaactatccaacatttcagaccagcatccatatagggcacagcttcttttaaaaatgtccaacgttctgcaacggaaaggacgtctggaagaagcagagaaaatcctggaagagctggaaaaaatattatatcaagagcctgactacccgacagacttctttttctgcatcgaaaagacgaattttgccatttcccatgggcacctctcacaagactatcttgatgaagcaaacatctggctccacaaaatagactccatttaccaactgcacccagaaaagttctaccggtttcacttggattataccactgctgcctactatagagccatgggaaatttggacaaacaatactggaaacaagctctggacatctactccaaattgcaagcagaatactccggtaataagcgctccacgtattaccgctggacttcgctggaaaaaatctatctctgtaaaatacaaggcatggccatggaagcctgccgaatctaccaggaattgtatcctcctatagatacactcgcttcacaaagctatatccggcaaatcaatacgataaaggcaaaataccaggtagataaggcagagacggccagcaataacgaatacaataaaatcataaccagcatattggtaggaacgatggcattagtaacgttatttgttctacttgccatcctactcaaaaggcagcgggaaaaggtgaagctctccacccaaaaactagcaacatcacggataaatgccgaaaatgccatgcgtgcaaaaagcgtgttcctctcgaacatgagccacgaaatccgtaccccgctcaatgcgttatcgggcttttcatccctattgacggaagagggactggacgatgagacacgccgtcaatgcaatgaagttatccaacagaactcagaactattgctgaagcttattaacgacgtgatagatctatcgagtcttgaattcggcaaactgcaattctgtattgtacaacatgatgccgtaagcatatgcagaaatgtgatagacactgtgaataaagtgaaacagacacaagctgaacttacattcaccaccgagctggaagaaatgcccatcgagactgacgactcacgcctgcagcaagtcctgattaacctactgataaatgctaccaaatttaccccacaaggcagcattgtcctaaagctggaaaaagaaacggacgataccgtactattcaccgtaacagataccggttgcggcattcccaaagacaagcaagccaacattttccaacgttttgaaaagctgaatgagaatgctcaaggcagtgggttgggactctccatatgccaacttatcatagagcatatcggcggacaaatatggattgattcagagtataccgaaggctcacgtttctgtttcacccaccccataagccagacaggtagaaaggagcataagaaatgaaacagatatttacattgctcattgccttatgctggctattaccgtccgcacacgcagatgtgcgacgggcagaagtcaaggatagcctgctacgtatatatctagcctctccagccgataccaccagattgagaactctatatcagatagcactgcttgaccaactgtcaccgacattcatctattacgagaacaaattactggaagaggccatcgctcagaaaaatgtacattaccagagtgccgccatatatgcgcacattatttattactacaatctactggaccaaaaacgtgcagaacaatggctgaggaggctcgaacagttgtctgaagagcacaactactaccgccattacttcagaggcaaaaagatgatgatagaatgctatatcatcagccagaagattgaattagccctcaaacaagcacaagacatgtacgacaaagctcaaagtctcggcaaccatgacggtatgcgcgaagcatgcctatgcctgatgaccggatatttcaataccttacgttacaaagaaggaatcacctacctgaacaaggcttttgaactgacaaatccggactcctcccttgccactcagattgatttattgacaaaagcggtactggcttactcatatctgcatgacaatggcaacatgttccggtatctggaggaactcaacaatgccaaaaatagattgcaggaagaaggcaccaccgtactgacaaacggctataccaatttgtatctgctcatagatttacaatacgccctttactatacccgccttcaacggcctgcggaagcatgggaatatttgcagcaatcagaacggcatctcagtacatcttcatttcttccttatcggttgatacgtttggcagcatatgccgaatattaccaactgacaaaagaatacgacaaagcgttggcttatttagaagacgccattgaacttgtaacccctatttcactggatgatgccatgatttatggacttcagaaagcggatatactagtaaagatggggtttccggacgacgcacttcctatctataaacaaataaccaaggcaagagattcgttatatacagtattctccacctcacagatagaacagatacaaagcctatataatatggaccaactgcttctccaaaaagaacagcggcaagccagttttcaccgtatctgtctggtcacctccattatcatcattatagccttgttacttttcaacctacatatgtatagaagcaggaagcggctgcaacaagatgagaaggaaatgcgtaaattggcaattattgccgaagaagccaacgaagtaaaaagccgtttccttgccaatatgagttataatatccgtattccactgaacaatgtagtcggtttctcccaactgctttccaccgacaacgagctggatgaagaagagcgaaaagagtattccggtattatccaggccaattcgggtgagcttatccaactggtaaacgacgtattggacctctcacgcctggaagcgaatatgatgaaatttcaattgcagaattgttatgtaaaagaatggtgcaacgaactaggttttctaatacaaatgcgcagtgaaggccgtatcctcctgaaactacaagtggaggtaggagatgcgcgtatccataccgacgtcaaccgccttacacaaatagtgacaagtatgctgctttatccgaacgactgtaaagaaacgcgcaaagtcagcatgttcttggtcaaccatccggacaaacacatcatagcatgccggatagagaacagcccgatagccgatcccaggtttgcctctcaaaaagtatcagtgcaacagaaaatcaaccagttgttctttgaacatttcaaaggtagctatcaaacagagaatgtcgaagaaggggaaatcgcagtgattacttttacctatccgactctttcttaaaaactgaaaatcggcttaagctccagttaaagccaatagtatcagagcaattcatttctaaagttcaaaaacgaacatttttcagtccctgctgtatgctatgccgctttctcgactccttatttagacgacatacaaattatacgtttttaatcaagattgatagcaagtaataaagaaaaccactatttttgccgaacgaattagtactaataataatttaaatctaaaagaaaatggcttacgtaattagtgacgattgtattgcttgcggaacttgtatcgacgagtgtccggttggcgctatctctgaaggtgatatctatcatatcgaccctgagacttgcacagagtgtggtacttgtgcagatgtttgtccttctgaagcaattcatccgggagaataatacaatcccagtatcaaaaacaaaagcgtgggcagataaactgcctgcgcttttttatatccccccacgtaagattcagtaccttcaaacccttcattgttattttctatatacggataacacattagttcacagacatgaacactttgttccataagtagaaaacaaagtgttcatactgtagaaaacaaaatgttcgtacagtataaaacaaagtgtttatactgtatggaacagagtgttcgccataatgaaacaaagtgtttgccataatgaaacagagtgtttgccataacaaaacgagcagtccgctttgatgaaacgaactgctcgtgacagcatgacagatgtcttgctaaaataagtttgtagaagaagttagaatcacttcagattagccagtgcttcttttatacgacggatagcttcaactatattttcatcgctggttgcataactcatacgaatgcattcgggagctccgaaagaagcaccacctacgcaagccacatgagccacttccaacagatacatggccaaatcatctgaatcattgattttacgttcgccggcagatttaccgaagaatgaatcgcatttagggaacagatagaaagcaccttccggtacattcacctcgaaatccggaacttccttggccaactttacaatcaaatcacgacgacgctcgaaagccttgcgcatttcctccaccggagcttgtgtacccgtataagcagcctcagcagccttctgagatacagaacaaggaccggaagtatactgtccctgcaatttattgcaagccttcacaagccattccggacctgcaatgaaaccgatacgccaaccagtcattgcatatgctttggaaacaccattcacaatgaccgtacgctctttcatttcggggaattgtgctatgctctgatgcttgccgatatagttgatatgttcgtaaatctcatcggcaatcacaacaacctgcggatactttgccaatactgcggccaggcctgccaactcctccttgctgtacaccgaacccgtagggttagagggagagcaaagaatcagcgcctttgtcttcggggtgatggcagcctccagctgtgcaggtgttatcttaaagtcctggtcgataccggcaggtacgataaccggcgtaccctcagccaactttaccatttccggataactgacccaatagggagcaggtacaattacttcgtcacccggattcaccaataccaggattgcattgcaaaccgactgcttggcaccattggcgcaagaaatttgtgcggcggtatattccagaccgttttccttcttcaacttctctacaattgcattacgcaaggcaggataacccggcactggagaatagcgagaaaagttatcgtctatcgcctttttcgcagcctctttaatgtggtcgggagtattgaagtccggttctcccacactcaggttaattacgtctacgccttgagccttcagctctgcgctcttttgagacatagccagtgtcgcagaaggcgacaaactgtttaaacgatctgataattggttcattttgttactatttaatgattgttacgcaaatccggttgcaaaataagcgattttctttgatataagaaaacaaaaagacagttacttattgaaatgaagtgtatgtcccatacgttctttcttggtacggaggtaacgctcgttgtatggattcggagtagtctcaatagctacgttctccgttatttccaaaccgtaagcctccaagcctacacgcttcacgggattattggtcatcagccgcattttgtgtactcctatctcacgaagaatctgggcacctacaccataatcacgctcgtctgccagatgtcccaggcaaatattagcttctacagtatccatgccttcttcctgcaatttatatgctttcattttttccatcagaccaatgccgcgaccttcctgattcagatatacaactacccccttaccggctttctctatcatctccattgccttatgcagctgctcgccacaatcacagcgtttggaattgaatatatcaccagtggcacaagaagaatgtacacgcaccagaatcggttcatccaattcccaagtacccttgaacaaagctacatgttccaaaccgttcgacttctggcggaaaggaatcaaacggaaatgaccgtggtctgtaggcatatccacttccactcctttttctacaatagactcctgcttcaaacggtaggcaatcaagtcacggatggaaatcaatttcaagccaaattcatctgccattctacgcaattcgggcaaacgagccattgtaccatcctcattcattatttccataagggctcccgccggataaagtccagctaaacgtgccatatcaatagccgcctccgtatgtccggcacggcgcaacacacctttctcctgggcatacaatggattaatgtggccaggacgcccgaaagtggccggagtagaagccggatcggccaacgcctggatagtagcagcgcggtctgccgcagaaacaccggtactacagccttccaatttatcaatagtaacagtgaagggagtacccaatacagaagtattatccgatacctgatgcggcaaatccagttccttgcaacgcgaaactgtaattggagcacaaagcacaccacgggcatgcttcaacataaagtttactttctccggtgtaatcttttcagctgcaattatcaaatcaccctcattctcacggtcctcatcatccacaacaatcacaaagttaccggctttgaagtcttcaattgcctcttctatcgtattcaactttacattttccataatctattttgtttttatttattctgatccctttctataattccaatcacatcttcatttgtcttgataatccgctccatatccttattcagacggatacggaatgcccagatacggaaataaaagaacaagcctatcgggaaaacaataccgcagagcaagtttaaccaataattgcggaacggacggacatgcgcatggacggggatgactggataggtgttcagcgctgtcaacaaagtaacggatcttgtattcgacatctcatctatcagactctccaaacgttcgttaatatcttccactgcctcatcctggctatcagtcatccacaatttaaagtaattgggagcacgtttcaacccctttctatcagcatattcacgacagtctacggacaaagccttcagctcttccggaatacgtgtataatcaggatcatggatgattacttccttacggaacagatggcgtacactgcgaatgcccacaaccttcttgaaccaatttatataggcatcagcattcaataccactgaatcattgttggatttatatgtcaggaatgcacccaatggggccaagacagcggtactggtccacatacccatccagacaacccactgtccgtcacgagccatcttataccctgtattgttgatgatgtaatagataataaaaatcaatacagaaaccaccaccggcattcccaagcctcctttacggataattcctccgagtggcgcgccaataaagaagaagatgagacatgccagagaaagagtcagtttctcatgccaggaagtcatgtgccgccgaaggctgctttcagtctgcgatatattaaagctcttaaaactccagtcactccccgcactctctgcacggctgacggccgtggatataaccttctgtttctgcatcagtgtagccacattgtagaggctgtctacattgtactcacctaaataagccttttcaatcttcaatgtatcctctttagacaagccggctgtcaccttataagctcctgccatagcttctttataataaccacgccccacactgtcattctgcaatttcatggaatcaatatccgcctgcagcattctcatatccttactgttggactgattactcatgatacctgcatccaccatattgaaatccgaattgaactcaatgattgcatgcttttcgcggaatgtctcacgccggtaaggcacattcctttggttcatgttctgcgatttcaaattctcaaactgctcaccactgtataaatgcaaatataaatgctgtttgtcagccgtcatctccagacgtcccgaatcagacttgataatttgagcattctcaaaacctttctcaaaattatatatcagtacgtcatacagcataccagttttgcggttcttatgcttcacatacagattataaccatctatttcatcgtagaacacaccttcaggaatatccacttcgggagatttctgcttcatggaaataagcaaagtccataattttgtttgggcttttggtcctatgacattttggaaatagaaagagacacaacagatgaaacaaataaagataatcaggggccgcatgattttcaataaagaaataccggctgccttcatggcaagtaattcaaaacgttctccgaaatttccaaaggtgataagggcagccagcagaatagccagcggcaacgacgcaggtaccaacgaaagcgcagaataaaagaaaaactgtgcaaggacagtcatctccaatccttttcctaccatttcgtccacatacctccataaaaactgcatcataaagatgaagaggcagatgaagaaagtacccataaagagcatgcaaaaactcttcaaaacaaatatatctaacttttttatgcgcagcattttactcgtttcatgcaatgagagcacaaaagtagtacaaaaaagggagtacgggaaatttttaatctaaagttaactaaaaaccacaagttcttcgcaaagtatccacttgcgattcccataattcacgcgaatcacccacctcgtctatatcggcaaagtctgttatctccaatacgaaatcattggtcaactcattgtttgtcatcttcagttcaaagtattctcgctcgttctcatcgtccagccagcggaagcggatgaatgaatacgcccgcacggcaataatctcggcatcacgtttttctgtttttccccaaaaaaaggttactgttttatcgtctgactgaaccctatcagcaaaccagccctccaaaccagtaggggtacttatcgctgcccaaagaatacttttagaagtcgcattcaagagatattccaaatgtattttctttctttccatagtctattctgctttttattgcgccagccaagataaatacttttttctaattacagaaaataaatcatcaaatttatttatatctccctttccatacacccctaattcattgataatgttatacaaagacgtttaataaaaagtactgcaaaccacttcagcaccctatcagcaaaagaaaaagcagaaaatatccataaaagttttggcaatttaaataaaagctatatctttgcacccgcaatcgagaaatgatggcgggatagctcagctggttagagcgcatgattcataatcatgaggtccccggttcaatcccgggtcccgctacaaaataaatcattgaaattgagactgttgagaggcttccactcttggcggtcttttttatttcgaattcatgggaacacggcgggaacacaaaaaaatcacctttaagccccattttatttgctgataatcacaatccatcttgtttcaatttagtaatactaataaaaaagtatgtatatatagccactatacaattatcattcttagataaaaactagagaatatataaaattttaaggcagggaacacaaacgggaacacaagtctaataacctaaagcaaaaatactaaaacatgaacactaaaaaaatcactaatacatcgaaaaagggcaatgcatttaataccatgacattgccccttcaatagataaatatagcaaatactacaaacactcaatttcatcttgagacaatccagtagcttttgagataatatcaatagcaactcctaacttctttaaattacgagcactttctcttttttcttcttcacgacctttaagtaatccttctgcccttccttcttcacgttcagtattgatattatcacgaaggattacaatattatccagatgacgataataggcagcaagctcatccttagtcatgctatccagtttcaacctttcacgggcctcctcaagaccgggagctgtagcactggaaggtatctctccggtattcaggtagtagatccattcttccaggggacttttggctacctgattgaaaccgtttactttcaggatataatattcaggatatagctgacttaccgtatccaccttgaatgtctgcttctggaatggagtgagttcaagaagatcgttggtgtggatgcctctgaactccgtctttccatgatacacatagtccgtaccatgtcccagagagaaatagacgatattaacgctatataccttacgaaccttgtcatagctttctcccctattgatatattcagtcaccagcttcgaagtgccgaacaacatacgctggaagtaggcgtattcattattgttctgcacctctatcagcaccagttcacccttggagttctcggcaagcatatcgacacggttatacttgtcatactcatcctcctgattgctttcactttccaggagtcgctgaataatgattttctcacccaataaagtagtgagcagaccttcaaggacactgaaattggccttgtttctgagcaggcgtttcatagcccagtcaaaacggattatctgattcttattgttgctattcataattgtctaatatattggttactacaaaggtaaacaaaaagattcagagtaccaaattgcataaggggagagcctcatataaatctttgaactttcatttccaattactttaaatagcaggaagtattttatagcgttttgaagtatccttatgtgtcacttcttacaaaatgagtatatttgcagtgaatataagctatcttataactaaatacataataataccattgatgaaaaaattaattatacaaactttggaagattttatgtctgttcaatatggagtccctgaaatagatttcttcagaggacagtcatcttctgaatataaattaattccctcaataggtcgaaggtttaatgaagggcaagaggatgtactgaaacaatatgagagggagatatttgtagattttaaaagaaaatattcaatgtttacagatacgcgtccgaagaatgataaagaatttttgtttcttgcacagcactatggacttccaacgagacttcttgattggacttataatcccttgattgcattatattttgcatgttgttcaaattttgataaagatggagttgtttatcatagttatccattctcaatgagggttttcaatgaagataaagatgacatactttcatttcccgcaataactttattagttcctaatatgacagatgttagatataaaaatcaaaacggtttatttgtactttatccagaaccatggaaagaagatttcggatacatttttgccaaatatataatccgcgcacataataagagagagatattgcgcaaacttaaaaaaataggaatcacaaggtcatttataatgccttctttggatagtttgtgtaaagatattgttgatatctataatttaagatattcatatgctataaaatagagctattttgctaatacaagcctattactctcttgaaatagttttaactaaagttcacccccaagcatctttttgctaaaagttattttatataatatattctcaatattcacatgaagacaaagctgtattttttataatcttccctctccaatcccttcaaatccttatatatgagaaaatggcttggagtataattcagcaccattaagataaggtgcgtcagcttcaagcattaatgataaaaacaattaccgggtcactcttattttcagacgatggataagatggagattcgatgatgcgtagcaattccagtatgtggacaagacataaagttccccacgaaagaatgtatgccgcatgataggccaagtaaatgcgaggagctatttacaacggttcaactatcacaaccagtcgaaagattggtctatttttttcttcttcccttccttgatttcccttcaaagccttatatatgagaaaagtatataagagaaatagagaatagaaacataataactaacaatttaaaacaactaagagacatgggaaatttaattaaaggattgaaggtcgcagcttatgtggccgagattatcgtggcaggttccgtagtaatcgagcttgcagaaaagtattgtggcaaattcggaaaaaagaagattgccacgggtgaagtcaaggccgttgatgctgcgactgaaaactgatagaacgtctgatgaatggattatgacaagaaagcggacgtgataataacggtattggaggtagcaacttcaatactcaaagggataaagaagctaagaggaatatttataaaagcaaagaaataacacctcttggctttttgtttttcaccgcattttattaaccgactaaaaaataacaagagtatggaaacaatgactaatgaacttactatcattccaagaacaatcggaatggtaacaagaatgatggatgcaattggtgtcgaagatgctataatcgtatctgaagaagaacagaaagagcatcctaattttattgagagcaacacttcgggaataacacttgaagaacttgaaaggaactgtattgtacccagcttcggagacaaccagctaacaatcagccaccagaaatttatccaccaagtagaagatgctgcaagaatgtattttaccggagagaactttggaaacacggaaatcagagtttcacataagattttaggcagggttccgggagcattgacaaaaaggaaagaagagcttagaccggaggacgagaccatctattatcaacgtatggctttctgttttcatatccgttccatgagcagaatgatgaacggcgaggaagtacatttatgtatcggaggtgtaagaagcctgaacgaggaaaacttatacgcccgaaaatcacccgagaaattcaagatctttatcgggtggagggttcgtgtgtgctcaaatctgatgctgaccaacgatggcttgaccggacgactggaagtaatgagtgatgcagatatttatagttcagcactcagactatttcaagatttcaaaccggagcaaaatttgagacttcttgaaaacctgggaagaaccaagatttcacaagaacagttctgtcagataataggcaggctcagattgtatcaagccttgcctgcttcacaactcagagaactgccgaaggtaatcctgggtgattccaatgtaaacgcagctacgaaaggctatatagagaaccctaatttcgggttacgtggcagagagaatattacttgttgggatttgatgcagctactcaatgatgccgccaaacaatcctacatagacaagttcctggagcgcaatcagaactgtactgatttttctgtaggtatccagagagctttaaacggtgaagatactgagaattacggatggtttttgagttagacctgaaaataaattaactcacaagggagaaagaactaaaatatggcaaaccggttctttctcccttttttgttgaaccctttgacagatatatgatatggaagtgaatgatattatgacatacatagacagattgctgcaaggctgttctgataaaagatgtgccgagattctaaaggaagtaacggaggaatgtcagtcacgtatagatgaatgtaggaaaggtgcttattctaaatcattgcaataggaataatatataaacaataatgaatattatggaaagatacgaattggaaaacagcagggagttcaaggctgcaaaagaacttgaacatgccctgaacgactatgggtggaatgagaaaaggttcgctattgcagttaccacattccacaggaccctgcaacagaccttattcagaagtatggttgaagtgattaagattatgggaagtgaagattacggatatgacctgagaaacaaggcttcgcatgagatttgtaagaagatagtggaatcgggagttctggaggacgagacgataccattcatctgaaacggttgagagataccaagactaatattccggggagggatatttccgataaaaaggaagtatccctccttttttatttaccgacaatttaaaattcagaagattatgttatactataatttttatggttatgaagaattcaaggcccgtttcggacttgaaaagagagaaaatggtgtggcggtaagaaagaacaggatattgctggcccacctgaaaaatcctgtactactgaagtattgcagggaacatgacgactatgccctgctacatatatatgatatggctgccctgcagaaaagagtggttgaagccgttatcgggtcgggcaagaatgatgaagaattaccgtatgaggtggaactgataggcaagacataccattccgccaaatataggactgacgaagccaaaggcctgtgtgaggatctggataaaagttcggtccgctatgtcaacattgaacgtaaccgggttttcaagatgagagccggaaagttcatgagggagcttatacttgaaacagggatagggaaactactctcgccttgtgtcgtaaactggattgcaggggatgttttcacccagcaatggtgtacttatactcatgggaaatcacctgatatggaacttcatgtcaacaatgattttgggagaatctatgatagtaactattgtaaagggagtttcggttcatgcatggtggatgagaacaggacttcgttctatcatgatgcggtgaaggcaaaggcggcttacataactgataaaacaggtctgattgtagcgagagccattctttttaccgatgttacggatcaggacggcaagaaatggaggctgcttgaaaggcagtattcctcggaaggtgatgatgtattgaaacgcctgcttgtggataaacttattcaggaagattatattgacggctacaaggtgatcggtgcttcctgtcatgaggcgaacgcatttgtggatgtttgtggcaactcgttgtctgacagaaaatttgaaatagattgtgaactggaactggaagacacgctttcctatcaggattctttcaaatggtatagttataatcagaacaaagcctataactacgaaaactccgggacctcatacaaccttgatacaacagaccttaatctttacggggatgatgatgaagatgatggggaatgggatgcttaccaccaatactattgttcagcaacaatttgttgctatcggaacggaagggagatctgggtggattcagagaacctggatgattttgtatggattgaatcaaagaatgaatatcaccatgagaacgattgtgtatgctgtgacaattgtggagagaacctgctgaaagataatgcggaatactccgaggtgacagaagagcattattgctgcaaggaatgtatggagaaagcggaaaatgagttcaagcggaagaactggtattattccgagtatgatgaagcatggtatgagaaccttgatgatataacccggatcaatatctggaatgactcggaaggagtatatgaagagaaatccattggtatagacactttggatggattgattgagaatgaagatgtatgggagttcggtgaggatgtatttgatacagtaaatccgagtaccaatctcccgtatggttataaacttaaaaaagaaataaatcatgaatatacaattattgaagaagctgtatagtatctacagccccagcggaaaggaacagaagatggtgaagttcctctgttcctatataaaacaactccccggacacatatcaatatcaaaggataaattcgggaacctgtatgtagtcaagggtaaagctgaaacttatccctgcctggtgagccatatcgaccaggtttcacactgcaagcattcaaaggatttcaaggcggtggagaccagggaaatcatattcggttattcgcccaagaacaggagatttgagaatctgggagccgatgacaagaacggagtgttcatctgccttgaatgcctgaagaagtatgattctattaaagtaatgtttttcagagaggaggagaccggatgcaggggaagttctgaagcggcgatgtccttcttcgatgacgtgaggttcgttatccagcctgacagaaagggtaattcggatctgattacaagtatcggatattctgacttgtgttccgaaaagtttatagaagcccttgaacctgaaaaatggggttacagggaggagaacggcttgatgaccgatgttctggcattgaaagaaaacggacttggggtctcctgcatcaatgtctcatgcggttactacaatgcccattctgacgaggagataacaataaagaaagacctgctgaaatgcctgctgtttgtagagcatatcatagaggattgtactgatgtatatcctcatgtactgactgattcatatttcagcccctatgaatttgaggatgaggtttacgatatgctgaaccatgacccgactttaacccctgaagaccttcatgacatgtattccaccaattttcctcatttcgggctggaggattatcgaaggatatgtgaggattaccggatgttctggtgtgatgatgaagaagatatatatgaagaaaaaagtacggacctaaaaactttggaagtatggaaagagacatgaattacgatttggaactggccaggtatatctggtcaatcctgaaatccgatctccccgtccttatgtcctggggagttgagattgagacagtgaaagtgataaagtgtggtattgaattcaaggtcaacggattcaagcacaccggaaaagttcagatagtcttgaatgaaggtgcggacctgtttgaagtctgtctgattggtgaggatggagaaatcagggataagagggaagacatctactttgacatgcttgtttccgaggtggatgaacttgtagagaaaaccgatgattatgaaaagaggattgctgaaacatataatattataaggtattagcagttccctgaaaaatcgggaaatgtgacaacgggctttctgtgagggagtagattttattggaactcgaaatctcatggaaagccttttttatgaaccaacgtgaatggttccatagattagacgaacatccagcctgtggaaccactgttaaaactattaaaaaaaagacgatgaagaatgaaaaccaatatgtggcttatcttcgggtgagcacacaaaaacaaggatactcaggactgggacttgacgcacagagggagataatacagaaatacctctgtggaaaaactccggttgctgaatatatcgaaattgaatcgggccggaaaaaggacagacccaaacttaaggaagcgttggccctatgtagaaaagatggagcaacgttgattgtagcaaaactggatagactggcaaggtcggtttcatttctgtccaacctgttagaaagtgatgtggatatagtattctgcgatttcccacaggcaaacaagatgatgctgcatatcctgtccgcaatatctcaatacgaagctgaattgatagcagccagaacgaaagcatcattgcaggccaagaaagcaagaggattcagacttggcaatccggaacacttgatggataagcataagcaagctatccggaacagtatcaagacttgtaagcggaaagcggacaataaccctaataatacgagagctgtcgcaatgctccgtacattaatcaaggagaaccataccctgaaggagatagcggatattctgaacagggagggattcgttacttcccagggatgcagcttctccaaatcaactgtatataaactgattaaaaggtataacttaaaagaggattgaaattatggaacctaagtatgtattgattctagacttttttgtcggctgtctgaatatcataaagctgacggacgaagaactgagagaatcagaggaatatgaggactttgaatctttcctttcaaccatcgaggagagatacggattcagacttaacagttgccaatggatggttacagaaaatctggacatccattgctatcagaacggagaagagacagaactcaatctgttatagtcaaaccaaaaagagaaactgaggtaatacttggtttctttttttctttcttcgggttggtcggagacaagagtgtgaaacgtaagtggaatgtatgacataactggaagacaaaagtgtcatagtcaagtaagtgaaatcgctccgcattcttatagtccctaccggttttccattccgctacgggctatatgttatcattacgacaatagtttgtcaatcattgactgtaactgcggcatatcacaatattgattgcttccaccggtataatcctttgcgtgccgggcagtccgtatcatgaacgaaccgagttctatccttatcccatcatccatccgcatatctgcggaatgattcaggtatacgaacttaccgttacgttcaatgaagcaacttgtatagtaatgccccttattctcggatacgaccactgcacccacggcttctgcatatctggatatttcacgcaacaatgctgtttgaaaattgctgtattcatctgaaacataagcttctgcgtctgcaaggacagaagattgccatttggtataaaaagtctgtgccatattccgttgcttctaattctgtaaatataatgtgagtcggtaataaagattaaatttattcatttgaaaatcagcaatataataataaaagcaatatatttgtagtattcaactgacattctaagcgattatcattatgttttcagaggttaaagttacgaagatttattgtatggcggttggtttttccaaagaatttgcaaaaattcaggaaaagacatataactaaaagtaagaatattaaacactatacaccactccttgaataatttcattgccaacccgccctctgtcatagcagcgtacttcttccaatcaaaacggcctgcgactatattgcaacagagtaattttagagccaccatacctttccaactctgaaaatctttcctgtaacttgttcttttcataatgaatatcaatttaatgagccatgttgtagtaaatttcgggttcgctcgagacgttgtaaaccccgtgcggtgaaagttttgggaacggcttatccctgccttttcggcgtctcgtgtgtagaggtttttcgttttcattgcatggttgtttttaatgtctcataaagtttttctatcatggcttctgcctgctccatatcgttcacgatgtctttgattcggtaaggtgcgccgttcttgccaatccataggcaggcttcatagtcaaggtcgaagccttcgtaatattcttcgatttcctgtaataaactatcggtgtcattgcctttcatctcaaccgagaaactggaatcctgtccgtggagtgtgtattatcgtgaagaagaacccggatgtggcgtgtatcataccaatgatgcaagcggcaagtattttcctgagagatattacctggattcttacgatgatgattcagagcattttacaaccatcgaagaggcggcagcgtatgtctctgggataatagggaaagatgtaaaacctgacaagaatgctgtcggggaggctttggatgaatatatggaagaacagaacgatgaggatgtccggtattctttccacgagtttactgtagtggatgaataagataaaaaggagagctgaggtaatgccgagggcactgaaaaagtcccccatatagtagcgtcctaaaaaaatcggcacatattcaggcaaaagcttgagtatgtgccgatttttttgtaactttatggtagtaatcagacagatatgctaccactacaacagactatacagttcagtaattattcggatctatacgatttgattattcctcgtaacaacctattgcgtcagataaatgatttgatagacttttcttttattaaaaaagaactcgttgacaagtattgtcaagacaatggaaggatggccgaatgtcccatccggatgttcaaatatcttctgttgaaaacaatctatgacatatccgatgtcgatgttgtggaacgatcaagatatgatatgtctttcaaatactttcttgggatgagtccggaggaaacagatttgattaatccgagctcattatgcaagtttcgcaagttgcgtctaaaagataaagatctactggatttgctgattggcaagactgttggcatagctatagaaaagggcataataaagtctcgcacgattatagttgatgccacccataccggctcacgcagcaatccttggtcacccttggagagtctaagattgcgctcgaagcaattgcgcaaaagcatatatgatgccgacgagaccgaaaagagcaatctgccttcgaagaacacggatgacaacattgagcatgagcttgactatacaaaggcattgcttgatgtagttagctcaaatccctcattggcagagatacccaaggtcaaagagcggctgaatatgctcaaggaggtacttgccgatattgaagaccattatatgacatcaaaagatgaagatgcacgggtgggtcacaagagcgaggatgactcgtttttcggctacaagacacatattgccatgagcgatgagcgtataatcactgccgccacagtgacttcgggagagaagggtgatggcccacaacttgaagagctggtaaaccagagccgtgccaacggaatgacggtggaaacagtcgttggagacacagcttattcaggtaaagacaacatcatattatcgaacaatgaagagaatggttttgagctagttgcaagattaaatccagccataagcaatggattccgtaaggatgaggataaatttgatttcaataaagacgctggcatgtttgtttgcccggctggccatatggcaattaggcgcgctgtacaaggaaagaaaggacagggaacgaatcagtcaatggtctatttctttgatgtagataaatgcaagttatgttcaaggcgagagggatgctacaaagaaggcgcaaaatctaaaacatattctgttcaaataaaatcatcagagcatcagcagcatgaggcgtttgagaaatcggaagagttcaggagtaaagcaaaagtgagatataagatagaggccaagaactccgaattaaaaaatgtattagggtatgaccgagcatggtcatacggaatagaatgtatgcgtatgcaaggggctatggttatctttgtagcaaatatcaagagaatcctcaaactcagatgaggggagagccttttcgttctctaaaaagcccttaattggccgtttttaagctttacagggcaagtaaccgctaaattcttagattcaaaagtagaaaaataagttcgccaaatccaattatatggacttggcgaacctttcattttattgcctttagagagcctttttcagtgccctcagctgcaaggctgctttgaacagaaggaggttcatatcgccagattggcggaggagaacttggcctatgcccatgaatatacaaactacacctgggaaaaagccggggctgtctatgaccggctggtggagaagggatgccttatggctcaggagtggggaagggaaactttctgtttcaggttgaccggcagaaagaaagggaacctttttatcactgttctcctccaatggtgcaagtccaatatcctgctgtatatgtttttgaaagagctggtgccggatgacggtaaaatctgggtaaagtcaggcgtcttctttcgtctcagggatggctcaataatcaatccggaaacggccaagagggaattgcaacgcatgaagacaggaagcaaaaaaaatgaagggcttgtcaggtatcttgtccatggagaaaaatagtggcacaaccaatcgggagggaagtggagattccatgttccctctctttatactatcagcctcatactgcactgtctaagaaaagatacgcccgggcaacaaaccggtacctggaacgcggaatcatcaattgagaaggataaacaagtcactccttatgccgcttcttatactcctccagttcctccatacttctgatattcagcacctccacgaatttcagaaccttttcatcgccgttcatcagggattcgcgcctggcctccctcataatctccccgttgagaaagatgttcctaaggcccagctccgtgatattgttctggaacatctgtatcagtaccgcgtcattccgtttgaatgcgatgaaccatacgacggaggcaattctggctaccttgtcacgcaatcgtgtattgtccttgtatttatccttgtctatctcatctatcctgccgacgtccttgagtattttcacggcttcctcagtgtcggggagtctggtgatgtctatacctttattcttcagcctggagagtttcagcagcagatcaccggcaaagacgtggttgaatacgtctgccttctgcttgggtttgactggagcggtcggaactgacttctgttcattttcatccggttctggctggactcccatatcgaaaatgccgtcacctagcttcttcttgaaagcattcgtcaccttcctggacttgtccttggcggtcaggtgggcgtatatcttatccaacatctgggtatcttcatggcctgtcgcaataattatatcctctcttggaatgcccttgcgacacatgatagtagaaaatgtgtgccgtgcagaatgggtgtgaagcagttcatagaggggcttggtatatttggtaccgttctcctcataggtcacaagttcgttaaggcctgcttcctgggctatgacttttaactcaccattcaatgcggaacgtctctccttataatatttgatttctgcaccggtatacttgtctatgatttcttctgctaatggcactagaggaatgatagccctggctccggtcttctgctggacgatagatattgtaccgttctcctcatccctctcgttatcaccgttgaagaacttatacatgtcactgatacgctgaccaactagacactgaagtacgaacaagtcctttatctccgttttctttttgatttgattctcggtaccgctcggttggtactcatagagttgtttaatctgctcttctgtcagtgctacttccttattacgcgccagttccttgttggatttgtctttcacaaggtcaaagctttcaagattactctcttcccacttgaaaggaatgtcaagtcgtttggaaacctctctaagcaccccaaagaatgtacctttgataatattctttatggtagaagctttcttaccttccttattgtcctccttaccctcttcaatcaagtgttgctggtatttggtgaatgtatccaggttcatactttcccaaatgtcgggtatggagttctcgtccagaaaccgtttgaacttgttgatattggatcggtactggattttggaactatccacgatatccttctcctctacgatctgtttcatgatgaaggtggcaggcttttccgtttttttcttcatagtatccttatagatatattgtttaagtagaatgatggccctgcgttctatctcctcagggtggtcgcaaaggtactgcttgtattccgaaaaataaagtttcagtttgccaatcttttcattgacgatggtattgttctcgttatccagctcagttaaccggcaactgatataagcctcctgtttcttgacgttccactggtccggatatacccttactccagtagaaagttttatctgcttgttcctgacgcgtgctacaaaataaacgttcgtcggcttttcggacttgggttttctaaggttgaatttgcatccgatctcgttgatgaaaaactgtgcattcataaagcgttttgggggattcgtcctttttgatattcttgaatacagtccttttaaagtacaaaatgacgaatcaaattaatatatcctaagttcaagcggataatgcaacaggagtgagaatgatgacaatgagaagatacgaaaagaataatttttcagaggaacagagaaagaagatttctttcccttttgttcccctgtggaaaagttgtttctttgcatcttccagttccccaacattcagttgcaatatgaaacagctaaccgaagaacaaaggtataacatttccgcttatctgcaaagcggaaagtcaagaaccgagattgccaatcttgtaggagttcatcgtagcactataagtcgtgaattacgtcgtaatagtgataaacgtaatggcatttacaaaccggatctcgctcaggctaagtatatgtccagaatgcgttcacgaaagcacttcgtgaagtttacggacgacttgaaaattcaagtagatatactcataaagaaagatttcagtccagaacaagtgactgggtttatgcgaacaaagggcttggaaacagtttctcatgagacaatctaccagtatatttgggaagataaaaagcatggagataagttgttatacaagcatttaagaagacggggaagaagtcataagaagagaggtgcattgactaatggacgtggttttatcaaaaaccgcgtggacatagacaagcgtcctacgatagtagacaagaaagtacgttttggtgatttggaaattgacacagtcattggaatgaatcacaaaggagcactattaactataaacgacagggtaactggactagtatggataagactacttagcgggaaagatgccagcccgctaactaaagctgccatcgatgccttggaaccttttagagaccaaatacatacaataacggcagataatggaaaagaatttagttttcacgaagaaattgcacgtaaactaaatatttttgtttactttgcaaaaccataccactcgtgggaaagaggagccaatgaaaacagcaatggtttgattaggcaatacttcccgaagggtacggactttagggacataaccaatgaacaggtaatgcgcgttcaaaacatcttaaactcaagaccgagaaaaagattgggttacatgaccccaaaggaaaaatataaattattaactaacaatgaattcgacactgttgcattgtctgtttgaattcaggtatagttctttgaaaatataccaaaacaaatctttttgcttctaaataaataatgtatttctaaataatacaagaattctttcaaaaaatgttttattactgtcaggaatacgcttatgatagttttttgataggattctaacttgttttggcaaaaaaaaatcaatctataataaatctccttcctatatttacttcagatttcattcaagttcttctagacttgaaaaattaaaaacaattgttaacttaaaatttatgctaatgtatgaaatgtagatttattcaaaaaagcttattggcattatccatacttccgtttccgctaacgggagtttatgctacagcagatgggtatgatatcgcttttttatccaatgaagagaagtttgtaatagattcggtgaaacgctccctgcaaggaagtgttgtggatgcaagtgataatacgccgttaataggcgctacgattaaggtaaaaggtactcaatatggaagcgtcacagatgtagacggaaatttttctatctttattcccaactcttattgtacacttgagatcagctatataggatataaaactcaagaaatatatatcacggatcaggggattgtcagtataagactgatgcctgacaatgaggtgttgagcgaagtgataatagtgggtgccggcacacagaaaaaagtgtcagtaactggagccataaccgcagtaaaaggtgcctcactaaaagttcccagttcttcattaaccaataacttagctggtcaattggcaggtgtgatagctacaaccggcagtggtgaaccaggtagtgcatcttcgttctacatccgtggtatcagtactttcggcggccgtaccactccactgattctgttagatggtgtagagatttcatcaggtgatttaaataatatccccccagaaaccattgagagcttctccatcctaaaagacgcttcggcaacggccatttatggtacacgtggagctaatggtgtgatgctgattactacaaaagctggaatggaaaacacaaaagccaaaatcaatgtgacatatgaacattctttcctaaaaccgaccaaaatggtgaagtatgcggatggcactacctatatgaaactctataatgaggcccaattgagccgcaacccaaatgaaacaccatcttattcggatgacaaaatcaattatacagcaagtggtatcaatccatatgtttaccctgatatagattggcaggatttgatgttcaataaaatgtcacaaaatcagcgtgccaatattaacatccaaggcggtggatcacgggttacctattatatcagtttgcaggctaaccacgataacggaattctaaatgtaccgcagaattattcgatgaataacaattacaatcgatggatgtatacatttcaaaataatattgactataaggtaacctctactacaacattgggattgagaatgaatgcacagataaccaactccaaatcacccaatacaagttcagcagatattttcggttcactctatttaaacaatccggtacagttcccggcctactatcctacagatgacaaatcccatatctatttcggtagcggttttttacaaggacaggatttatatcctaatccttatgctaatatgctcaactcgttcaaggaagacaatcagaatatgatgcacgtcactttgaatcttgaacaacagctggacttcattaccgaaggactctctctgacgggactggtgaactttaagaactggtcaaaaagttactacacacgttccatgtctccttattattatcaggtagtggacggaagctggtcaccagacaatcctgactactatgagttgcaacgtttaaaagaaggttcggactatcttaacgaatcgggcatttcgaaagaaagtgaccagacattctattttgatacacgcctgaactacagtcgtacatttggtaaacatggagtgaccggtatgttgatgtacatgatgcgtgaattccgaaataatgtgttgcctaaccgcaatcaaacattttccggccgtttcacctacgattatgaccataagtatttggctgagttcaactttggttacaacggtactgaacgtatggctaaaggtgaacgttttgagttctttccggccgtttcattgggatgggttattagcggtgagaagttttggaagccgatacgaaaatatctgaaccattttaaagtgagggcttcctatggcttggtaggtagcgatgaaactggattggctagtggcgcaccacacttcctctacaaatatgacatagacctatccggaggatggggattcaaatccggtacgaataactccaatagtcaaagttaccaaggattacgcataaaagattatcccataaccaatgcttcgtgggaacgctctaaacagtttgatattggtgtggatatgcaatttttcaatcaagtggacgtgaacttcgattattataagtataagagagaccgcattttgctgaaccgtgcgtctttcccacggattctgggttatgaagtagccactccgtgggccaacatggggcgcgtggataatgaaggtgtggaactgagtgtgaactggagaaaacagcttaaccgcgatttggcagtagacctccgtgtcaactatacatattcaaagaataagtacgtatataaggacgaaccagactatccttatgtatggcaaacagaaaccggaaaaccgttggactgtgtacgaggctatattgccgaagggctgtttgtagatcaagccgacattgactcacatgctgtccaaaacaactttggtagcgacgtgatgcctggagacatcaagtaccgtgatgtaaacggtgacggtaaaattagcgaggaagataaagtagtcttgtctccttatggctggcccccccgtatccagtatggccttggagtcagtgtgatgtggaagaagtttgatgccaatatttttttcaatggttcggccaaaagaagtattcgtcttatggatggtggagataggatttatccgttcgtacaaacacaacatcatggacgtacaaacttgatgcagtggattgccgacagtcactggacagctgatggagacaatgctaatgttgtatggccacgtatgggtatctcgcaagcgcaaatagctaataacttacagcccagtagttggtggatgaggaacggcaatttcttgcgctttaaaacgctggaaataggttatcggccaatttcgtattgccgtatttattttagcggagacaacctggccgtatggtcacctttcaagtactgggatcctgaactggactacaacatgtatccgttaagtagaaccttcaacattggcgtacaactgaacttctaaaacttgagtcatggaaaaacaattaagaacaaaacagaatcaatcgatatttaatatgaaactgaatagatttaaatctaaaatgtatgtggccattgcttccgctctcctgatgcccgtaatagtttcgtgtagctatttggatgtatctccagcggaaacagtagataaagatgacatgctcgtgacacaagtagatgctttgaagtatctgtatagttgctatggtcctatacaatgtgataattcaataagggcttttcgcccgttcaacttgcggcagggaagtgatgaatttgttgcattggcccctcaaaacacagattggcagcgctatcagtgggatcaaccttcaggtgccaacacctattacggagcctttgtaaattattatgacgctatcggctattgtaaccaattcattcgagatttgagtgaggcggaaatagttgagctaaatccatctgatgccgcacagtatattgctgaagctaaattcctcaaggcttattttcattacaaagctatggaagaatatggtcctattcccattatggatgtgatgttgccaatggacatttcaaaaaaagatttgcctggacgttcacatattgattattgtgccaagtatattgcggacttgtgcgacgaagcttatgccaacttaccgattgcccacagtaatccacaatattatggacgtgctacaaaagcaatggctaagtttttgaaagcaagggcctattggctgactgcttcaccactttataacggagagttcccacatacgacatggagcaacgaagagtatgaaactccgggctatggaacagagctggtaagtcgtacttatgacgctcaaaaatgggaaacagcacgagtagcatgtttggaggctatacgtgaagctgatgctgccggacataaactgtatgatttggaagcttcagaagctcggcgtcttgctgacaatatcccattgccgcaaatacctggtctggataccactactccagaaggtgaagagtttgccaaacgagtgatgttgatgcgctatgtgccagtagcaggtcccaacgaagggagttctgagtttatctggggaatgttagatattgctcccgatatggataatgcttccataccacactatgttatcactgatcaaaatggtatcttgcgcggtggatggggatggataagccctacgctctatactgtagagcactttctcacggccaatgggaaagtgccttccgaagatgagaactttccttctgaagaaaactggtttaagtctgccggactcaataatccggacattgtcaatctctatgtaaaccgcgagccccgtttttatgcctatattggttttgatggcgatgaatattctccggttatcaaaaacggtgctccgcttattttggatatgaaaaacagtcaagagaatggttacaatccgaattttggggctaacaatcagtcgcagacgggatttttaaacaagaaaatggtacatcccaatgtacgttatacaggtattgatggcaacaacaatctggcgctgggatatgatcatcccttccctttatttcgtgtggccgacttgtatttgatgtatgctgagtgctgtgcccggcagaacaaccatttggatgaaggattaagctacctgaataaagtacatacccgtgcgggtctgaaggctttcagtgaaagtgaaatgagtggaaatggacagttgctggaagccgtacgcaacgagattttctccgaattctattttgaagctcgtcgccaattagaaattcgccgcaacgtagagggggacaaatatatgagcaaaagccattatcgcaagttgaactgtatggtaactaatcctacgtttgaagaattcaaccaaattgaagttatcgaccagccattcaagtggaacgaccgcatgtacttatatccggttgttaattctgaagtctacgctaatccacaactggtacaagctccttactattaataaatcaaagaatggataggaagtatggtaatcctttctaacttgatttgcccaataaaatgtaattaatattataaaaagactatgaagaaagttgtaaaaataacattgattttgcccttcttgctgtcggcttgcaatgacaatatagacatacaagattggtttcctactgaatatcataaaattctttacatacaggaaagtggagaacaagaggttacactttacaatacaggtgaagataatgtttatacatttacagtatgcaaggctggcagtgacccatcacttgaggctcatgtccgtattgatgtaatgtcacaaagtgatgttgatgtaaaatattccaacaatcaaggaattccttataaaatcattccatctgaaacatttacttatgaaccatctgaactgacatttgcttcctctgatatttctaaaaaagttactgtcgcaatcaatccggagaaactaaaagagataatggaactcccttccgaagtaaatactcgctggctccttccgcttgttgctgtaagtgagaacgattcgatcaacattgataaaagagactatactttactgataaacgatgttatgacattgctggctggctttaaaaaaactggaacgcaaatcatcaatcatgattatacatctggcacatttgtcacttcagtaccttttggcttattggaagtaaccaacaagtgggacatcaatgccaccattaaagtggataaaaattacgtaaaggaatataataacaacaacaacacaaactaccagatacctgccgatggttcatatagtattgatgaaaacgtgactttgtcttcgaatatgcagaatgtttctataaacatttctatttctgattttggaaatcgaaaatccggctgttttatgcttcctatccgtattgccgatatttcgaggtttgagctatccgctgaggcaaatctctatgctccaatagtaaggctactgggcaaacggcttgaccgttcgggatggactgccgaagcttgttctgaagaaatgacgggtgaaggtacgactggtcgcatcatggatgtgctggatggtaaccacaataatttctggcatacgagctggcaaagcggtccattctgtaatcatccgaatgaaagccattatgctgttttcgatacaaaaagcgaacatatgtttacacaagtcggaatcattcaacggaataatagcgattggggactgtgtgtgcaaaattatgaagtattcatcagttcagacaaaaaaaattgggtatcagcaggcagatgttttgcagaacgtagtaccgacgaattaattgcagatattacaccgatgaagggacggtacgtgaagttgtgctttctagactccagacgttctgacggacagataaatctttccgaggtctatttctatggtgaataatgtcattgcagaaagatgtggcaaagccggttgctttgctatctggtcagtttatcatggttttgtcacatcattacggattttgtctgtgtaatgaacattttcaggttggtcaaaaagtacccaattttacttttaatacttgtttttaaaattatgaaatcagaaatcaatcaaattatcttgatgctactagtatccctatgtgggatatcctgtaaaagtcacaatttatcttcagaagaagaacaaagcgaaataaaggaagaacgttattggaaccccattattaatatttctgttcccgatcctacagccattcgtgcagttgatggaactttctatctgtatggaacggaagatacacgtaatatacctatatatcattcccaagatatggtgaactggaagttcgtcagtaccgctttcacggatattactcgccctcaatttcctgcgcaagtttctgcctcagaggccagcctttgggcaccagaaattcgttatattaaagggaaatatgttctattctattcgttggcacggtggggggaacattgggttagtacagttggatatgccttgtctgacaagccagaaggaccttttgttcccaaaggttatgtactgaccagcaaagaaatgggagtagaaaattctattgaccaattctattatgaagaggatggcaaacattatatgttatggggaagtttcttcggtctatatatcgtagaattgagtgtggcagatgatatgactatcacggcaaagaaagaaaccatgaaacttattgctggtaatgcctatgaaggtgttaatgtatggaaacgggacgagtactattatctgtttgcttctattggctcttgctgtgaaggaatcaagagtacatatcaaacggtggtggggcgttcgaaaagtctattcggtccttatcaaaataaggctggagaacaaatgctaaacaatcggcatgaagtggtacttcgaagtagtgtggataatgtttttaaaggtactgggcataattctatattgctggaagacgatgccgggcagacatggatgatttatcatgcttattataaaccttgggctactggggacaatggccgaagtgtcagcatggacatggtaaaatgggtggacgaatggccttatgtcaatgatggtactccatctgttagtgccaaggctccaatagttgataaataaagataacgagaagatatgaaaaatttgttgttgctatttattatgatttcttttgtgtgtacgtcttgtacaacaaaaacaagttctcaggaaaaacgaaatatctctataaagtcagtaacagctacttacaagaatccagtctattctgaaaattcgccagatccgtcggtggtacggggagacaatggtatgttctacgtattttctggttctatggttttagaatcaccggatttggtcaattgggagcgtcgtaatcgttgggcatttgatattactcccaagtggacgaaaggtgatatttgggctactgatgtgacaaagtgtggtaatcattatgtgatgtactatgcactctctgaatggggtgagcactggaaaaatggagtgggagtggcaatagccgatcaaccggaaggaccttacactgacaaaggcaagcttttcacttcagaagaaatcaaagtaggtaacagcattgatcctcattattttgaagaagatggagtgaaatatctttcttggggaagtttctatgggctgtatgcagtggagttgagtaataacggtcttagtgtgaaagcaggatgtaaaacagtaaaacttgcaggagatgcttatgaaggcataatgatacacaaacataatgctcattattacttgtttgcttctacggggagctgttgcgatgaactgaattcttcctatactactgtagtggggcgttcggatagttactggggtccttatgtaaatcggaaaggtgaacgtatgttggataataagcacgaagtgctaatttccaataacgattattttgtgggaacaggacacaattcagagattgtgaacgatgatagtggaaacgaatggattatgtatcatgcttataatgttgccagaccggaggatgggcgagtgttattgttggaccgtatttattggaaggatggatggcctatggtgcagggcaatcatccttcccataacccccagaaggcgccaaccattaaataatgtaaatacgatataagtaaataaatagtttattgaaaattaaggatatagtggtaaaagtgacaaatttatagtgactaattataactttaacacgattatcactatgttcttagactctaaagttacagagacttattgtatggttgatgatttttgtaaggaatttgtgttgtagtaataggaaaaatatatgattgaagataagaaaactatgtatcgtaacaagtccaaccatatgagtgatgtcgaaataatggtgattcttatcctattccattccgtttttttgctacttcaagcattattaaaagaagcatgcttgcaaacacttgaagggcttgtttccacgatgtgtatcctataatcgtgttgtgggatagaaaagggaagacttgcttcctctgacctttttcattaagaaagttttattgggaatctgtaccgaaattggctttatcaactccactctcctgtatgtctccgtaactaacggatattgattcacaaaactctcgaaggacttgccctacgtggaaaatgttttatggaacggttctttggattcaagttgcatacttatcaatgacaaagaagaaatacttaatttatgttcacctcgaagaatgtaaataattgggagacattgaaataagctaagttcttgaaaatattagaaagaaaaaattgtgtatacaaaggatatatcggttagaccatatgtaaaagcttattttttcaacggcatacagtttgttactaaagctaaaaacaataggaactccttgatgaatataagtcggtaagattttgctcagaaaaaggagcattaatggaaaccgtcaatgataaactgaagaacattgcataaattgaacacctcatataccattttttagtagtttcattgtaaatcccttgtggctattgttacctactgttctttaaaaaacagctattgatatcaaatttcctgaattcaaacagacaatgcaacagtgtcgaattcattgttagttaataatttatatttttcctttggggtcatgtaacccaatctttttctcggtcttgagtttaagatgttttgaacgcgcattacctgttcattggttatgtccctaaagtccgtacccttcgggaagtattgcctaatcaaaccattgctgttttcattggctcctctttcccacgagtggtatggttttgcaaagtaaacaaaaatatttagtttacgtgcaatttcttcgtgaaaactaaattcttttccattatctgccgttattgtatgtatttggtctctaaaaggttccaaggcatcgatggcagctttagttagcgggctggcatctttcccgctaagtagtcttatccatactagtccagttaccctgtcgtttatagttaatagtgctcctttgtgattcattccaatgactgtgtcaatttccaaatcaccaaaacgtactttcttgtctactatcgtaggacgcttgtctatgtccacgcggtttttgataaaaccacgtccattagtcaatgcacctctcttcttatgacttcttccccgtcttcttaaatgcttgtataacaacttatctccatgctttttatcttcccaaatatactggtagattgtctcatgagaaactgtttccaagccctttgttcgcataaacccagtcacttgttctggactgaaatctttctttatgagtatatctacttgaattttcaagtcgtccgtaaacttcacgaagtgctttcgtgaacgcattctggacatatacttagcctgagcgagatccggtttgtaaatgccattacgtttatcactattacgacgtaattcacgacttatagtgctacgatgaactcctacaagattggcaatctcggttcttgactttccgctttgcagataagcggaaatgttatacctttgttcttcggttagctgtttcatattgcaactgaatgttggggaactggaagatgcaaagaaacaacttttccacaggggaacaaaagggaaagaaatcttctttctctgttcctctgaaaaattattcttttcgtatcttctcattgtcatcattctcactcctgttgcattatccgcttgaacttaggtttattaatgacaggtaactggttattttctgattttatatcacactaacacatgaaatttactgtaagaacaaaagtaagcattcgaagaaatgcaccttttacactttgaggtttggttgtagctttgcggcagtgaatacaatcaaacctcaattattatgaacagacaagaatttgaagaattagaattgcaggtgcaacaaagcgagctgccgttgaagtcgtaccttcaacagataggtgtaagttattcaacctatcactactggcgtagaaaatgttccgttgacaggagcagtatcaaacacgagttggctcctatcagttttaaacaggcatttacggagtcttcccaagaagaacaattgccgcatggtgttgcgctgctgtttcccaatggacttcgtgcccacttcgggagcggttctgaagatttgctgaaggaaatatttacccaaagtcttcgagacggtcatgtttaacctgaacgacacgatgcgctacttcctgtgtcctggcaggacagatatgcgcaagggtatcagttcgctatgcggagtggtacatgagaaaatgaacagtgaagtgaggaacggtgatgtcttcatcttcatcggttccagccgcagactaatgaaactccttcatgccgaagacggaggtatggtaatgtatgtaaaacgtttggaggccggtcgcttcaagctgccggagtatgatcccaaatcaaacagctatcccatggagtggcgcgatctggtgatgatggttgaaggaatacaggaaaacccggaacagaggctccggcggttaagagccgaacgtaaggaataccatgtataacatgttttttgcgtgagtaaactttggatattgttgcataattcactgttaattagtatatttacatcattaaaagaagtatagacaatggaagaaaaagaaattttactcaagacgatagaagggctgaatgcctctatagcctcattgtctactactaataagaatcaatccgaacagataaaaaatctgcaggaacgtatcaaggagttgacggctcaggtcgcatggctgaaccgtcagctctttggtcgtaaatcagagaaacttcgcgtatatgatcctaatatgccagacctctttgccgacgagttttccggactccggcagcaggcggaagaaaagcgggacgaggctgtggaaaagattgagaaggaatcggtggaagacgtaaaacgaaatcgtcagaaccgcaaaatgatagaggacttgcccgtattggaaaccgatacaatagaaccgaaaggcgtagacttgtctttataccgtagaataggcgaagagataacaaaagtcgtcaaacacaagccgggaatgctttacgtcaaggtgatcatccgtcccaaatatgctctcaaggatagtaccctgcttcctccagccggacagaaaggcgtagagatagctcccatgccgctgatgccggtcgacaagtgcattgctgacaccagcctgcttaccgagatactgcttcagaagtatgaatatcatgtcccgttctaccgtcagatacagcaataccgccatcttggaatgaaaggccttaccgaaagtacactggacggctggttcaagaaaaccgtggaactgcttaagcctctgtatgaagaactcaaatgggaagtcttctcctgtgactatgtacaggcggatgaaactacagttccggtcattaacagagaaaaacacagagccgacaaggaatatctctggatggtaagatcagtcatggagaaactggtcatcttccattacgacgggggatcacgggccggagcggtcatcgaatccctggcaaatcaatataacttcaagggatatcttcaatgtgacggttttgcaggttatgaaacagccttcaagaccaaccccgacgtgcggctactcaactgcctggtgcatatacgccgtcattttgagcaggctttggatgaaaacagggagatggcgcaacatgcactgactcagatacagcatgtctataaaatagaacgccagtgtgacgaagccggcctgtcatatgatgagcgcagacagacgcgtcaggaactgtccaggccaatcatggaggcaatgaaggtatggatggagacagaaggaattaaatacagtccaagttctttgacaggcaaggccataacatatgcctataccaaatgggataatattatgagatgtctggacgatggccgcctgtactgggacaacaatctggcggaaaatgtccaacggcccatcactctgagcagaaaaaattttcttttctgtggtaatcacgaagctgcggttaatatgtctgtcatatgttctctgctggccacatgtaaggcgcacggggtaaatcccagggtatacctgaacgatgttatcgcacaaatgccttatcacaaaaaggcaacccaagaagaacttttgaatctacttccacataaatggaagttgaaacatccggaatgtgtactgacaaggcaaaaggaggaatcttgtaactgatataaattgtaacatatgggttcaacaaaacaatagcggctgatactattaggttcatagtgacagtcgctattgttgtatataaaggtttaatacctgtagttggccgaatacttacgaacaaaaagtcgttttaaatttatccctattttgcgaaaaagtaacttcttgccatagcatatgtatgaaatatactgttgatattatgaaagaccttacaaatggtcgacgaattctttaggcgacataccgaactgcttctgaaaacattgagcaaaatatgaagaagagttgaatcctaccatctggcttacttcgttaattcgatgatttccttctctgaacaaataggctgcttttttcaggcgttctaattgtatataattattgggagttatattaagtgtgcttttaactttacgatgcaaagtggaattactgacatgcattagctctgccatttgttccaaattgaaatctgggtcttgcatatgttcttccactatttgcgcaagcttgtgtaagaattcccgttggtcactattcaatcctatggatttggctgatacgaaaggagattgtagaaagttgtttcgcagtttttcacggttttccaatagattattgatggtggcatgtaatagttttatggaaaaaggcttttccatataggcatcagctccgcatttcaagccatcaattttatcttgtaaatcaactttggcggtgagcaatattagcggaatatgactaaattttaaattagatttgagtagatgacataatttcagtccatctatatcgggcatcataacatccgatatgatgaggtctatattttcattttcaagtaaatagatcgcttccctaccatctgcaactactaatacatgataagtggcagataattgatgagcaatgaatgtacacatttctttattgtcttctactaccatgatggtgtactgtggcagagaagaggttccagtctttccttgttcaataatattgtattcttttgttatctgagatgaagtggggcatgttgagatgataggaatagaaaggataaatcgagtttgtgcagtattgggatctaatgttaaagcgccatgatgcaattctgccaataaacgtgccagcggaagtccgattccagtaccggatgctttttccctgcattgtacgaagggtttaaatatctcctctctcatttcaggggagatttctggtccatcattacacatggataacaaaaagtgaccatcttcagtccacagacgaatgtgtagataggtttctgcatatttaatagcattgctgaaaagattactgataattttggtaatagcctcattgtcggcatatgtggtaatatcttcttgtcgttcaatgatatattctatattttgtgactcagccaatgggagaaattgtttatagagattttccagaataatatctattctgcattctgccaattgtagttttacacccaatgtctctgctttttggaaatcaagcagttgatttaccaaattgagcaatctattggtgttcatatctatgatttgcagattctcatgcatttgtaccgggatatttttcggagtagcaagtatgttttccaaaggtactttaatgagagttagcggagtacgtatctcatgagtaatatgagtaaagaattctattttggcattatataaatcatgttcctttttgcgctcaattttttcaaccagagtttgttgtttctttatatattttttacggattattattaaactgataataatgataactattataaaaaaaatgtacagcaagtatgcccaaaccgaaaggtagaatggaggatgaatacaaatctgtaattttttatgaatatattctcctgatttcggtttataggtattcttcagatgcaaagtgtaggtaccgtagggtagatgtgagtagttgatgatatgtgtagattccacttcataccattcttcattgaaaccttctaaacaataaaccagttggtgtaaactgggggattgatagcccaaagctgctacgtgtaatgagaacgaattttggtttgcttgtaactcaatcttatcagataaacagatgcttttcttaaggggagattgtcttgagttgacatttaccggcttattaaggatggataagtcagtaatgacaataggtggattgaagttattatctgtgaaagtactcggcttaaatcgtatgaatccattgatacagccaaaatagatttgcccttcagtgtccttataactggcttgataattaaactggttggttaggattccatcatctacagtataaattcgcttgtaattcttgttaggattgaaacacactaatccgttgttagtagtgagccataaatttttttgatcatcctcttgcatgcagtagaaggtgttgcctggaaatccatcttcgctattatagcaaacaaaactatcgttttgaggtacgtatcgacaaaaacctcctccttgtgtcaagaaccaaagctgccggttactgtcctcatagatatcagttactttattataaggaagtgaagaaggatcgtttgggtcatttctgaaaaacttccaggtatcattatggatatcataacgataggctccattggcataagtggccacccagatattgttttggtaatcttcaaggatatcgtatatacaacacccttctaattgtggcacggatctgaagtcatctgtatcatagctatattgtagcaacccatgtatagtacctatccataatgtatttccagtcgttttttttatagcaaatatatcattagtgttcagcccatttagtacattgcttttactataatgtttcactcttcctgtacacaagtctattcggcttagcccgccggaaaagtttcctacccataaccagtttttatctaggcataatccgtgtacattacttgatagatatggatgtttgaaagggatgatgctatctttggtttgatcaaaataaaatagccctttgtcctcagtaccaatccatagattaccatcactggcctcacaaaatttgcttaccctttttccgaatccgtggtatctttcaggatagaacttctcaaaatggttgtaggggtaaggataatagttgactcctccgaagtaagttcctagccacattcctccttctcggtcatggcagatagcataaataacattgtcactcatggcgtaagaagtattgttttccggtgcagtaatgtgtaaacaagtatctttttctgtattatagatatacaatccattttcagttcctatccataattcattgtctgacctataacataatgtacgtacatatccgttgattaatctacgggtcttatgagtagttaaatttacttctgtgagtccgttgacagaacctatatatcggtagtggtgttttcccttgatttgtactgttatattatcatttttgaatggctcatttccattgacatctttaaatggtgacaatgttcggaagttgtcttcggaataatagagattattgtcatacaaccctaaccaatacttttttcctgttttccaaaaatgattgatgtttggaaggggaatattttttcctctcttatgtatgggcagttggttggtgagtgtatgtttatgtatattgtaacagaacaagccttggaagtccgctgcaatccagacgtctcctccttcctctattgatatctgagtaatggtggaccgaatactttctttttgaggggtagttactcgaaatggactgaatgtttccgtttctgtattatagatgtacactcccacatcagttcctatccatatattaccttgagaatcttcggtgagagtagtgatgtagttgtttccaagagtagaattctcctttttaaaaatcttgaactttattccatcataacgattcagtccatctttggttccgaaccatataaatccttgtcggtcttgcataatagctaatacactattgtgagaaaggccattatatatatccaatgttttgaaataaagctttgatgtgtgttgtgcatataaattgccacaatatataaaaagataaattatacagcatatagtggataacttcattgttattctcttgtttttatttgtctgtttatttagattcatgataatatattgaccaatgatatttgcaatagacttacgatgcataattgcaaaattacctaatttattgttatatctttatttaaaggtaaatgcataatttgaaatatttatttttataacatatattaataattaaaaaaatgtgcgataatcgtttttcaacaaaaatacttatttttccgagaaatgtaagcgactgctcaactacatcttgtgtattcgatttatctgtaagatgcactccattgtaagtgcatcttaattttcatataccaatttatcttaggggtatctttgagagtggtaatctcattttttcccgttttttcctgcattttcccggaattgtcccgattatttcctccatacatccggtagtagttccttcaagtctctgtctgatttgggagcctgataataaaggagtctgccggtcatatcactcaaccattctccgggagtgacaccatgttccttatatgagccaagcaaggaacagattatagccgtcttctcagccgcttcgtggtttccgcagaacagcatgttctttcttgatatgactaatgattataggagactacaatggtcgaagacaagcgcaacgaaggggaaaagatccacataggaaagccctggacatctttgaaaagccatgtcttcaatcctcgtgactccctgcggtatgattatctcctccggttcactgttatggcacatctgttttttccgaaaagcagcattcaaagccaaccctttcaaagtggtcatagaataatggagggaagtcctttttcggaagattactcttagttataaatcaataatggaagcaaaatcagatgtatactccgataattatgtcatcaatattaggcctttcattgtatagaagatactgccgtttgatttttacatgaaggtttatatttataaacgataaaaactcttaaataggattttattgttttacttgattaaaaaatataagcaagagacaattgccaatatctgttttttgatttgaaaatatcaccatcgaaaatttggtctatggtgtcatgtttgtctcctccaatatggtgtttggcggattccgtcaagccgatattatagtagcagcttagcatcagatgtttcataatctttgcgccaccgccaagattcagaccgacttcggtggaacgccatcccatagaagaaaggttcttatctatggcatctacggctatatgggctagtttgcgtccccaattgtcctcattcaccaaaaaagaaaaagaaggtcctattcctaaaaataagtcaaaattgtcagacagtcccatttcccatttcagttctatggggatgtcgatactttgtgttttgatgtcggcactggcatcattggaggtgtttgtcaatttcactccacgttgtacatacaatagggaaaaatctagggttagtccatagaaaccggtctgatattgcagcatgggacctacttgaaaaccggtcatattctctgttttaacccagttgcttataccatgaatatcagccttgttaccaagtataccagctttcaatcccaaatgaagtccctgagccatacaaatagcaggacacagccatactaaaaaagataacagataaaaaacttttctcattttatttttaataattgttattataatacaaaggtatggattttggtcaagacataatggcatggattacggtattattggtaaaaaaatcattttttttgtgcttttttcgcttcaatcaatttctcgtattatttcagtttcttctccatcaaatatattgttaactttgcttttatattggaatctggtttactattggatgatgcatttttattatacgatatgactatttgattaaaggtaaaaatgaataaagtgataatttacggaatgatgcctgttcttttgctgtttttttcatgtaatgaaaaggataatgtaaccttgtcagaactggcaggtgaatggacagtgatagaactgaacgggcagtcagttacggctatacaacagccgttcatcggttttactcaagaaatgaacatctatgggaattacggctgcaatcgcctgacgggaaaatttgaattgtcgccacaatctacacagatggcaatgagtaaagttagcacaaccatgacgccttgtccggacatggaattggaaacagacatgttggaggcacttgttaaaattcggaatgtcaaacatggggagaccaataggattgttctatgtgattcggtgaacaaaccattaattatacttgaaaggcggtgttatgaaatacctttggatgatttgcaaggtaaatggaatattgagaaaatttatggagaatctgtgtctgatacgataggagaaagtccgttcatagcttttaatataacatcgaaacagatatgcggaaatgcaggtggtcgttggatagcaggtcgttttgaaactgaaagcagtaagaggaattctatcacttttcttgatataaaaacagaacaaaccgtattgaatgccttaaaagaagtaagaactttcggtctgcttgttaatggacatgtggggttataccttcggacagtacgatagcatttgaattggtgaaaatagaatagaaggtgttttttataaaaaattgatttcaatgaaattatatgtatttatccaatgctttttgaaaagaaggtcggttcaatattttgttcttttctttattttgatttccatcatggcggttatcgcaagttcgtttgaagaaatgactatatatagacttcctttgtttgggataacctatgtttcttcttttgtctttttaatcgaatatatagcccgtatcttgtctgcaccggcactttatccgaatgataagtcagtaaaagcacgtttaaaatatacattctctttttatggctttgttgattttgtagcggtacttccttgtgtgcttacttatatatattgggatacggaagtggtgcatatcattatcttgccatatatttttattatattcaagttaatacgacattcaagagcttttcggcttattggaaaagctctcgcttccgttaaggaagagcttgaaactgcctatgtcgccagttttatcaccatctgtttttcagccattcttatgtattatattgaaagaaaagcccagcctgaagtttttgaaaacataggagacggaatctggtgggctattattacatttgctacggtaggatacggtgacatttatccaattacccctttgggcaaacttctaggttgtatcatttgtttggtgggggtagcaatggtggctattccgaccggtattatcagttcttcttttattaatatggtacaaaaaaaggaacaaggccaagaaaaaggaaatgacagccaagaaaaagtttgatataatgaacttttgcaatggataggttgcaaaagaaattttataacgtttccttgcgattattttctgcaaatagtagacatatagataatactttatgaattactgttatttcccacctgcttaattgaagatgggaaactttagtaatagcatttactttaacaacaatgaaaaagaaaataactcttatatttctaagttcaggcgtcttattactgttctctttgtgttcaactatattgaagattataactggaaataaacaatgtgcatgtcctaattgcacagaacggacaaccggtaactccgtctattgttcatatcatataccacactgttaaaacagtgcaaaaacatctgcacaaatacagtttattgaaaaagaaataagtggtaaattctcatattttgaagtgttctgtttccgggaatttgtggaaataaagccctatttccttttaatagtctatattttattcatctgtgtcatggagtggacacaatatcaaaacatgtgtctataacgaaaaatagagtaggaagaatactactattttatttttctgtaagcattcgaagaaatgcaccttttacactttgaggtttggttgtagctttgcggcagtgaatacaatcaaacctcaattattatgaacagacaagaatttgaagaattagaattgcaggtgcaacaaagcgagctgccgttgaagtcgtaccttcaacagataggtgtaagttattcaacctatcactactggcgtagaaaatgttccgttgacaggagcagtatcaaacacgagttggctcctatcagttttaaacaggcatttacggagtcttcccaagaagaacaattgccgcatggtgttgcgctgctgtttcccaatggacttcgtgcccacttcgggagcggttctgaagatttgctgaaggaaatatttacccaaagtcttcgagacggtcatgtttaacctgaacgacacgatgcgctacttcctgtgtcctggcaggacagatatgcgcaagggtatcagttcgctatgcggagtggtacatgagaaaatgaacagtgaagtgaggaacggtgatgtcttcatcttcatcggttccagccgcagactaatgaaactccttcatgccgaagacggaggtatggtaatgtatgtaaaacgtctggaggccggtcgcttcaagctgccggagtatgatcccaaatcaaacagctatcccatggagtggcgcgatctggtgatgatggttgaaggaatacaggaaaacccggaacagaggctccggcggttaagagccgaacgtaaggaataccatgtataacatgttttttgcgtgagtaaactttggatattgttgcataattcactgttaattagtatatttacatcattaaaagaagtatagacaatggaagaaaaagaaattttactcaagacgatagaagggctgaatgcctctatagcctcattgtctactactaataagaatcaatccgaacagataaaaaatctgcaggaacgtatcaaggagttgacggctcaggtcgcatggctgaaccgtcagctctttggtcgtaaatcagagaaacttcgcgtatatgatcctaatatgccagacctctttgccgacgagttttccggactccggcagcaggcggaagaaaagcgggacgaggctgtggaaaagattgagaaggaatcggtggaagacgtaaaacgaaatcgtcagaaccgcaaaatgatagaggacttgcccgtattggaaaccgatacaatagaaccgaaaggcgtagacttgtctttataccgtagaataggcgaagagataacaaaagtcgtcaaacacaagccgggaatgctttacgtcaaggtgatcatccgtcccaaatatgctctcaaggatagtaccctgcttcctccagccggacagaaaggcgtagagatagctcccatgccgctgatgccggtcgacaagtgcattgctgacaccagcctgcttaccgagatactgcttcagaagtatgaatatcatgtcccgttctaccgtcagatacagcaataccgccatcttggaatgaaaggccttaccgaaagtacactggacggctggttcaagaaaaccgtggaactgcttaagcctctgtatgaagaactcaaatgggaagtcttctcctgtgactatgtacaggcggatgaaactacagttccggtcattaacagagaaaaacacagagccgacaaggaatatctctggatggtaagatcagtcatggagaaactggtcatcttccattacgacgggggatcacgggccggagcggtcatcgaatccctggcaaatcaatataacttcaagggatatcttcaatgtgacggttttgcaggttatgaaacagccttcaagaccaaccccgacgtgcggctactcaactgcctggtgcatatacgccgtcattttgagcaggctttggatgaaaacagggagatggcgcaacatgcactgactcagatacagcatgtctataaaatagaacgccagtgtgacgaagccggcctgtcatatgatgagcgcagacagacgcgtcaggaactgtccaggccaatcatggaggcaatgaaggtatggatggagacagaaggaattaaatacagtccaagttctttgacaggcaaggccataacatatgcctataccaaatgggataatattatgagatgtctggacgatggccgcctgtactgggacaacaatctggcggaaaatgtccaacggcccatcactctgagcagaaaaaattttcttttctgtggtaatcacgaagctgcggttaatatgtctgtcatatgttctctgctggccacatgtaaggcgcacggggtaaatcccagggtatacctgaacgatgttatcgcacaaatgccttatcacaaaaaggcaacccaagaagaacttttgaatctacttccacataaatggaagttgaaacatccggaatgtgtactgacaaggcaaaaggaggaatcttgtaactgatataaattgtaacatatgggttcaacaaaacaatagcggctgatactattaggttcatagtgacagtcgctattgttgtatataaaggtttaatacctgtagttggccgaatacttacatttttcttattactcgattttgtattttcccgataatctgaggcactttctcatattgcccttaagataaccgaacattctccacatggtttctgttctatccatccaagccttccggataatggtgtataatggttatagttacatctcttatcgatagtgtttactgtattccaggaggcttttattttttgaaaagtgagaagacagcctgcccacgtatagagcttatgaaacactatcttcacaggcaataagattcttcaggctgtctccaatctaattaccttacaatcaatatccacaaagataaaacaaccggacgagatatacaaatgcccatccgaccaatcactggcagaacgggcataaaattactcaaacaatattaagggcggtcagttaacatgaaacagtttattgtgataattcatcctcacggaaaaataccaacccagaccacccttgaatacaaattctaaaaccgtatctgaaagttagaagatttagatgaaatatgcaaatgaaatcatacaaaaaaactctcatcctgtcatcactgaccagacaagaaaaagagatttgtgtgtataatttccatgcgctcacgatgaaacaatatgaccatccattcctttataaaaacgaataggattatacagacaaaagcaatgattgttgtcggaacttccattattcaataccggcaggcaacgtaaaatagaaagtggagccttcccctttcttggactccacacctatacctcccccatagtgttccacaatggatttagtgatggaaagccccaaccccgtacctttaatattgtagttcatcttcacaaaccgttcaaagatggcatgtcttcccacttcatcaatgccacagcctgtatctgccacataaaaatagaagttatgattactcaatctcctacaaccgattttcacactgcccatctccgtaaacttcaaggcgttcctcaccaagttacctataacttgggcaaagcgcacgcgatctaccaccaaacggcattgaggcagccgttctacaaactccacctgaatacctgtgggatgcgagcgcatattctctgtcgtgcagacttcatcaatcagcgcgttcacatccgcttctccatcattatattccagggtctttgcctcaatctttgaatagtccagcaagtcattgaccagttgcagcagcgagtccttgttatcattaatctctttcaggaaagccatacgggtttctctgtccagatcatccatttcggcaagcatagttgtaaagcctacaatagcattcaaaggagtacgaatttcgtgagtcatattagctatgaaagcatccttcagctggttggattcttcggcaacctcattaatgcgctgcaacgtcttcaaccttttgcttttactgatggaaatgattatcatgatgaccaaaagcagaatgacaatcatgccaaaactgtatatcaatgcttcatccttctgatagaggccgctggtccagacatcatatgctgccgtaattgttagcatcatcgtttattgcttgcttattggaaaactataaaattataggaagcaaatatactaaagaaaatacaaataaattaatagaaactacagtttttttccaacaaaatgggccgcatgccattaccaagtaaagcatgcagtccataaattcattattcagtattattggtatcagccttcaatggcagcctgtgccactctaatatagctatgaaaatcaattgcaaacacttcctgtgtaagcaaatgtttatttaaagtttaaagtttgatggattttccatcatgacttaaaggcatcgttgaaaagctggcttaactatcagatgcttacactatgctggtaagctctgagcctgcaactcatatctattacttcactaaaatcttgtactcaccacaacctctaccaatctctccagactaggcaactatggttaatactatggttatttctttattggttcacccaccttctccttatagaaggatatctttagataattgtatgctacttattcctttcttatgggttaagaatatatacaatgcatagaaccatttctttaatgatacatgactaccttcaaacattgtaccaagagtaaccgtaaatcttttcttacattgtttacatttatatagtcctttaaattctccattagactttaacttataatgctctttcgtttgacaattacagtgtgggcaaattggttctccatgccatttaatatcttcaagaaattctctgcataatttttcatcataaaaggatttcatcaaatcaataaatgactttactcctcgcatttgtttattcttctttattatttctacaatattgattatttctgtttccaattgacatgttatttttattatataaacataataaaaaaaacctaacacacagaacataagttattaaaaaatagatacttaaataaaacaattgggtataattatcatatacatatatcctgtaattattgctcatttaaacattaaccaagtgcttccaatacgatacttggaacacttggcttttatctgagtataattatcatatctatataaaaaatagaacccgactgccggaaacaatcggattcctatttcactttttgtaatagtacccaaatccgatcttaagtgttatccacttagaattctttaacaaaattctttgattcacttgaaaacgggcataaaaaaagtagggaagcctaaaagatttcccctattgaaataagatataaatagatagaataaaaattagtatattaaagtatataattgggaaaaaagaattcgcttcatacaatcaatacttcggttaaaagaaaccgattctttaaaactaaacatagaaaatgcaaacatctttaaaggcctttcctattgaaactctttaagctaatcatgcactaaatcaaaaactatattttcatgaagagtatttattgttcacggacatatgttctgcgatttgctcccactccctttacaacgattttcttccaatgcctaggcagtgctgaaggcaactgtttaataccttcatcggtcaagtccaaaccacaaaaaccattaatcaccatctgaagcaatccgcctgccccagtagtaaaataaggatttgttcctcctgcaccttcagagattaccccgaaaggcggcaactgatttggccggaaactacgcacgaacaattcgtaggccttctcaccatcacccaaccgagcatactgcagagccaatacagaataagacatggcaggccctgttttatcgattttgggctcatagtagagtaaatctctctttatttcctctggttgagttatgacttttaacggatatgccaacaagttcgcatctgcctgtttaataacctgaccatcatatccatcatattctctagtcactccatctgagaatctgggtattcgcagtctctctgcaataatgttccaagaaacagggggtgttacaccacaaagaactgccgctttggaagcatcttgcagagcgcacatcgcagccgcattggtaaatgcattatcattgaccccctcagcatactcatcggcacaaacaacattgcaaattgagtaagaaccgtcttcattctgctccacacggcttgacaagaattcagccactttttccatcagaggatatccttcttctcgcaaccaacgcatatcacggctcatacaataataatcccaagcagcaatagcaatatctgccgatatatgatgttcaaaaggacctgtcaaggcaaaagtaggacatgattcctcaccagcatcgtcactttcccaagggaacatggcaccatcataaccatagctaaatgcccgctgacacgctggtttcagccgatcggtacgataatccatcattgagcgtgctattccctgattgagaaaaagcataggaggaaacatccaaaactccgtatcccaaaaaatatgtccattatacccttgcgatgtcaatccgaacggtggtatgctcaagcgactacctgaacgagcgcttgaatataagtgaaaaagagcaaaacgcacggcaagctgcgcttcggcatcacctacaatttgaatatccccttcccataactcattccattgtttcaaatgtaaatccatcagcctatcaaccccttccttagctccataaataacctctcgatcggattcattgcaaggatctataaaatcacgatgcgtacagacagcacctaacaaagcaaaagaaaatgtttctcctttctttagatcctttgtaaatacgtttcgaccattaccagtctctgtaacttccgtttcatgctcaaaaatgaaagtcgaagtagcagagacctgcagttttctatgcctagtcaaagcggaggtacgtaaaagtttcaaattgagtccaaaatccttaatactcttccggtgcactacaggctgcaaaaaatcatcggggacatcagcactattttccaccgacaagccgacaggatctaaagcttttacgttcactctcaccaaacctgcataaggcatactgcgcaaggcgcagatactataagatacttccaacttattggcataaacaaatcgagtctggtgtatggcttctttcatattgatacattgttcccaatcggataaaagttttccatccaatacttccccatccactttcatatctatacagaacgggttaataccacaaatcagcctactaacatcatgtggaacacctgcatcaaacacatgattcagtactacctgcttgacagagaaaggttctttccaaggtaaaataccaattcctccatttcctacggcagtaccataataggtgctatgataatctgatgtctttatactccaaaacagatcttgggcataaacaaaagtaaatccacacactatccatatcaaagctaacagtatattttttttcataactatattatatctaatactaatgttctaaaagcgaatatgatacaaagaagacagataaaagctattctgcaaaaaatgttttagactgtacgtcccgactatttgtacctaccatgacttcaaaatctccaggttcataaacatattgcaatttcgaattgtagaattttaaatcctcctctgcaattacaaacttaacttcacggctttcccccttctttaagaaaatgcgttcgaatttcctcagttcctttaccggacgaacaacatcggcatagatatcacgcaaatacaattgcacgacttcataaccatcataacctccttcgtttctaacagtaacagaaacaattatttttccacctttctttaaaacattagaacttaataccatatcgtcatatcggaaatgggtataactcaatccataaccaaatgggtataatgggtcattgctatcttctaaataattacttgtataacgattaaacgtacatctatccggatcaggacgacctgtattgtgactattgtaatacaacggaagttgccctacagaacgtgggaatgaagtcgtaagctttccactgggactcacttttccaaacaacacgtcagcaatggcatctccagcttcactaccagcaaaccaaacatttagaatggaaggaacaatagctgattcttcaactagcgctaaaggacgccccgtgaagagaagcaacacaacaggttttcctgttttgactaatgcttttaacaagtcacgctgagcatctggaatttccagcatagttcgtgaagcagactccccactcatctcagtacattcacccaaagcagctacaataacatctgctcgggcagctatctgcaatgcttctttcaataaagtctgattatttccacggtccaatggacgcatacccgcagctgccttttcaagattttcatcatagaaaacattacttcctttagcataaaggacttctcctttatcacctaccgcatcacgaatcccttcgagtaacgtacgatgtttagaaggagtacacatcatactccacgttccacacatattattacgtgcattagccatcggaccaatcagtgctatttttcctttagtagaaaggggaagcaatgacttctcattttttagcagaacaaatgtttcagatgcaatgctgcgagcaatagaacgatgctcagtagtataaagctgtttcgatgctcgtagggtatcactatatttataaggattgtcaaacagccctaatttatatttagcttccaatacacgacgacaagccatattgatttgttcttcagtcacttctcccttttgaagagattctttcaatgtgttcagaaaaccagaggataccatatccatatccgttcctgcctgtagagaacgtgctgatgcttcttgcagaggagcaatgccgtgcgaagacatttcggcaatggaattataatctgtaaccaacaaccctttgaatccccattcttttctgagcaagtcagaaatcaaccatttattcgcagtggctggaattccatcaacaatattgaatgagctcataacactacccaccccggcatctacagctgctttataaggagcaaggtattcattatacattcgtaatcggctcatatctaccgtattgtaatcacgtcctgattctgaggctccataaagagcaaaatgttttacacaggaaagaatttcatcgttccgttgtaaattgtttccttgatatccccgtacataggcctttgccattaaagaaccaagataaggatcttctccacttccttctgctatacgcccccaacgtgcatcacgacaaatatctaccatcggactgaatgtccaattcacaccatctgcactagcttcaatagcagatatgcgagccattttttcgacagctaacgtatcccaactacacgaaagagccaatggaatagggaaaattgtttcatagccatgaactacatctgcaccaacaagcaagggaattttcagcctactttcttccacggccaaacgttgtaattcgtaaattttatcgatgcctttcacattaaaaaagccacctatctcctgcttacgaatcatttcactcagttctccatttttcacagttcctgttgtgatatcacccccagaaggcaaattcaactgaccaattttttcacgcaacgtcatgcgatccatcaaatcactgacacacttatccatttgattatcagtcacatcaattcgaggagaggaacatgcttctcctaatatagcaacaaggaatgctagaagaaaatgccaatatgttttcatattcagattaacaattattgtttttattctataacagcagcaaaaccaccgtttctcttcatggtaatagtaatagacgaagtctttgtaacgggagtctgcttgtgtctataatccatagcttgccgattagcattaatgccatcttcaaaactactcattcgataagagcgcccttcttccagaaaatcaagaggaatttcaaatttcctttcctgtactgcattgttggttatacctccaataaaccacttcttccccttgcgcttggctacaattacatactccccaaccttagccttaagcgccttggtctgatcccaagttacagggacctgtgaaataaaacgagcacaatcctcattttttctgtaattaaccggattgtcagccaacatttgcaatccactctcaaaaagaacgaatgtagctaattgaaaagcccgtgttcctacacccgccgaatttggacgtaaagcactgtagagttcaggttgcatacttatcatgggtcctggtgtgtaatccatagggcctaccgcattacgcataaaaggaaggtatacagtgttatctggataacatcccctcatatgttccagacctttcactccttcataggaaacgacattgggatatttatattctaaacctccaggagtaaaagatccatgaaaatcaactaggagatgatgcttagcagcttctttagctacacgttcatagaaattcaccatccactggtcacttctatccataaagtcgattttaacccctttaatcccccaatcttcgtaagtcttgaacaaatcaaaattttgttccacagctacccacgatagccataagataatgcctacattcttgtcttttccatactgaatcaattccggtaagcgcatttgtgaattgggcttgttaggattaagcacagtttcagcccatccggcatccattacaatatatggaacatgaaaggatgaagcaaaatctatgtaatatttataagtatcataattgcatcccgacacaaaattaacatccggaccataaagagctgcatcatgccaccattcccaactagccaaccctggcttaatccatgaattgtcttcaagaacacttttagtagccaatttgtaattcatggtgttttcaatgagctgggaatcgtcgctactaataacaaaataacgccatgggtaattccgatttccttcagtttttgctatataatcagcctctttagtaattttcatactcagatttccatcttctgcaaactccaaaggtgctttggggaaaacggcattaaatccattataaccatttccctttaaaaacatacaaggataatcaaaacgatcggattcgcccaccaatattttatattgcttgcgagtatcaatcaagatgggaagtacggacatcttgtccgtacccttccattcttgacaggtaacatgtgtatactcttcttcataaggtgttttaaaacctgaaggctgttgtaaatggagcagatactcttctggaaaggaaatagcaaaatcttctccaagtacctcaaccttattggtcttacgagtaataaaacgataagctaccccatcatcaaaagcgaagaattcaacggaataacctttgaaatcaagagtaagagcattataacaactcgtaatagaagagaatttaagaggaactacaggcttcaactcttttgagaagctattacgcttctgtcgcaacaactttgggttatctcccaaaatttcatcatctaataataagcgaagataattgtcctttaataaaacttcatcattatagtaaatatcataataaatcttatctgataaacaaaactccacttttatagtcttttcaggagaaaacaaagtcatttttttcttgccatatactgccgtagcaagtagccctattaacaataacagataatatttcttcatacacatgttttattatttttgtgagaatgatgataaaacgtgattatactccttttcactcaaccgcaccatagccccatgccgggagtcgggaatcttacaatcacaaactacccatttttctgcctctatatgctcagcatcaaaacgtacatactcgtatggatatctttctgaaaaaatcatccatcccttaccatcgggttttggcatgagaataggagcttcaaaataagtactgggagtagtgacagggtgctttggatttatcaaagcataagagccggtcaagcatgatgacttagccaatcgaatagatttccctgtaggtacaccatcttccggccacctttcgtccttaataaccgcatagtagtttttaccaattttgcggattatgacatcaatagtggccatctcagattcatccttgtctgaaaaatcaaacaaacgttttggagaagaaaaagagctaaaatcttcagttagcacataatatgtacgcatgcttctccattcatcatctcctttggctccttttttagctgcatgccacgtaacaatatactgtctggaatcctcatcataatacaatttaggtgcaccgaaccaatttctttcagtataataattatcagtaaggataaaaggagatactggaagttccttttcaatactccagactacaagatcacttgaggtccaaagcaatggtttctggtttttctctgaaacaccgatcatataatacctattgtcatgacctttgattatatcaggatgtcctctgtattcagcatttactcgttgattattattcagtttagtccatttgcgtgcatctctacttatgtagtagtacatatgcccatagtcttcatgtcgcatatgggcaaaaaggtaccctccctgaaattgcgtattatgagactgtccctgaacattcgaaaagtaaatgctgacaaggcatacacagaaagtgctaataagtaagtccttaaatttcatgtatctaaattttaattagccaatgcaatatcatcttcccagtgaggacgactataagtttgactcaaatcctttccgtacgatttagcttgttccaccaaataatttggaagtggcatgtactgatgagtaggaagcatttctttagccttgaaacatgcttgtgcatatttattaaagcggattaaatctatttttcgatgtccttcatagagaaactcttttgctctttcatctaatatgacatctaggaaagcctccttggtggcagtttgctgagctgacaaatcacttaaaccacttcttcttctcacttgattaacagcatctacagcttgagaagaaggcgcagcattagatcgcctaacatctacctccgccatcatcagcaatacatcagcccaacgagccaatggaaaatcgttaccctggaaagtcgtattagtttcaatggggtacttataaataatatatccactccatcgctgacccaaatcttctttggtcaccttcccagtaaccgtgccttgattattgacccaatactcatccaatatcacagcccgacgtttatcatttggttcataactatcatacagttttggtgaaacattgtatgcctgcatccatccacctccttgatagttaaaaggtgtaggatttcccttgtcatcaactttagaagcatcgttaggcgtagcaagcatagacaatggaaagaaattaccgctactaacgtccccattggcagaaggatcacaacttaaagccataatgatttcacaattaaaatcattcgcagccttaaacatatcaacataaggattatcccccttcttaaacaaactatatcgattatctttactcaattcttgatacatctgcatggctttatcataatagcctgtcatatgttctccttcattaaggcaatgtttcatcatacaaaatttagcataatctgaagtataacgaccgcgttcctttacttcattaggcagattatccgcagcaaactgaaaatcattataaatccaggtactcatttcgtccaacgaaggtctgactaggttagtcaaagctgcttcattatttatattatccttatccacaattgcaggcaatggtccataaatatgcatgagataataaagcatcaggcctctacacaaatgagcttcacctaacagtctttccttgctgattgttttgaaaatttgatcgtctgcctgctctaaagtagagataatctcagtaaagcgagtaatctgggctaacttaggaatatggttgatattatgctcacccacccatgaacgttctgcgtagacacaatccctgtaatctgcttgagaaagtttcatccatgaaccccagcctaagttccatgcggccatattatcagacggagcctcaaaaactctcagtatacccccttcagggatatagaaactatgctgacccggatcgtttcctatttgatactgccatgttgttgtaaaaggaatatagcacgtcatcgtgtaatcttcatattcactttctgttttaggatagttttccggattcaatgttccgaaaagtttaggatcgaaattatcttcacagccagataaggctaatgatgtaacctaagttcaagcggataatgcaacaggagtgagaatgatgacaatgagaagatacgaaaagaataatttttcagaggaacagagaaagaagatttctttcccttttgttcccctgtggaaaagttgtttctttgcatcttccagttccccaacattcagttgcaatatgaaacagctaaccgaagaacaaaggtataacatttccgcttatctgcaaagcggaaagtcaagaaccgagattgccaatcttgtaggagttcatcgtagcactataagtcgtgaattacgtcgtaatagtgataaacgtaatggcatttacaaaccggatctcgctcaggctaagtatatgtccagaatgcgttcacgaaagcacttcgtgaagtttacggacgacttgaaaattcaagtagatatactcataaagaaagatttcagtccagaacaagtgactgggtttatgcgaacaaagggcttggaaacagtttctcatgagacaatctaccagtatatttgggaagataaaaagcatggagataagttgttatacaagcatttaagaagacggggaagaagtcataagaagagaggtgcattgactaatggacgtggttttatcaaaaaccgcgtggacatagacaagcgtcctacgatagtagacaagaaagtacgttttggtgatttggaaattgacacagtcattggaatgaatcacaaaggagcactattaactataaacgacagggtaactggactagtatggataagactacttagcgggaaagatgccagcccgctaactaaagctgccatcgatgccttggaaccttttagagaccaaatacatacaataacggcagataatggaaaagaatttagttttcacgaagaaattgcacgtaaactaaatatttttgtttactttgcaaaaccataccactcgtgggaaagaggagccaatgaaaacagcaatggtttgattaggcaatacttcccgaagggtacggactttagggacataaccaatgaacaggtaatgcgcgttcaaaacatcttaaactcaagaccgagaaaaagattgggttacatgaccccaaaggaaaaatataaattattaactaacaatgaattcgacactgttgcattgtctgtttgaattcaggtaataaaaaacaatatgaaggattttatatttttcataatcacagttattaatattaattagaatacaatgtttgttccaagtgtgaatgtgcgagcttgaggatattcgcctctggatgcattgtttgctccacccccacctgtatatatttcggggtcaaagcccttaaatttactgatgacaaacggattttgaacatctgcataaactttaatgcctttcacatattttttgagtttacccaagattttatccctgaaattataggataaagttatatttctcattctcacaaacgaggcattttccatgtctatattaacgccagcacctccaggcaatgcacccatgcgatccacggccagtccaggacgagtaccattgggattggtttgagagttccaaagcaggtaagcatatttgttagtattttccggatagtctaccgctaacggaccaggtaatgcagctctatacgcaatattagacttaaggattccaaattgtccgtacatgaagaaactgaactcccaattcttataagtgaatgtattgccaaaaccaatataaatatctggtgtattatcttttaggtagatatcattttcatcaatttttccatcattgttcttatcatcaataattggacaacctggaagttgggcttctgcctgcaatgttttttgtgactccggcatattgctgcggtcagcgttaataataccagtcatcttatagtaatagtaggcattcataggttccttgtttcttttttgatagctacgataatcatagttcggcattctttctttccagaacgaattcgttttcgagaaagtcagttgcgtgttccaattaaaatctccgaccatatttttagtatcaagcataatttcccatccttgacgatagaaatggcctccatttataggacgagttgggtaaatggcaagaggtgatgttgatgcatagcccaataagctggtcacatcattgcggaatacatcaatactaccacttactcggtttttgaacaagtagaaatccaaaccgatattcttcatgatagttttttgccaacttacgtcaggataattagttcccattgagacacaaggtacataaaaaaggccattatcattgaagcctaccttaaatccgctaggctcataaacaccataaagtgaactacctaaattatcctgtcctgttttaccataactagctctcagttttaacaaattaatccaaaaaacatccttaagaaatttttcatttgaaattttccacgctgctgaaacagaagggaacaaagcatattttttccctggaaaaaacttatcggttccatctcgacgaagggtcgctgaaatgacatatctatccaagacatcgaagcttaatttaaagaactgagatcttttttcatttttcaatgtatgagaagttggatatatctttccttttgctgaactaatatcatgctcattaatcatgtcgtgtgtatcttcgtaagagataccgtatccttcattgctttccaaatattttcccataccagccatggcatccacttgtacgaaattaaacatatatttcgaaaatgacaacatcgcttctagggtttgtgtctgtctacgctgtgagtaaatatttcctcttgacttatacattctggcaaaatacacatcggatggaatgaatgttgatcttctgacattttcttgattcatgccatatacccctttaaatactagaatgtctttatacaacttcgcgttgatagagaaatttaaactatatccattctctttactatagtccacaatatcctccattgctttgggattaggaatattacggaaaattgtataactcccatcatcctgcttcaccggcaaataagatggatacagaagagctgatgtcaaaacactaggagcaacatcaccctgatttcctgtatcagtaccaattataccattatcatatgtattctgattagcgttaaaaaccgatgtcaagttcaagaaagggaacaaatccaaacctaaattaccatgaactgaatatttagtcatgccagatcttgatacagtaccttgctgcttcaggtagcttcctcctagataatacttaaatttagagtgtcctccgctaatcgtcagattatgtttggtaaggaaaccattacgtaataccaagtccttccagtccgtatcggttgcattttgcatatccgcttcagtaaactggggtttccattttccatcataaggagttgttccataaggatattgcttgttattatacaaatagttttccttattgaaaacattagctaactccatgtactcttttgaattcagaacatctagatatggatagttacgtacaaaagaatagctgccatcatacacaatattaggtgctccttcttttcctttcttagtagtaatcaatataactccattatcagctccaataccatagatagccgcagaggcatctttaagaatttctacagactccacatctgccggatttaaattggcaataccattacgatcgatattattcggaagacccacttggccacaattaccactaagggcgttattcggcataacgataccatcaattacatagataggatttcctcctccacgaattgatatattcacctttccatctggctgcatactattcactgttgcctgtaacccagcagctcgtcccatcaataattggttaacatggctggtaccagcttgtgaaattttatcagttttcacttgcgcaatagcggtcgtaagatttttcttcgacacagagccataacccacaactacaacttcatcaatgagttttatatcttcactcagataaatttctaaaaacgatttatccagcacatcaagcacttgcgactcatatccaatataagaaacaacaattttcttatctgctgaaacatttattgcaaaattaccattaatatcgctgattgcgccaattgattccttttccaccgcgatacttgccccaattataggttcccctgttttacggtctttgattatacctttcaacatttttgtattggtctttaccgttttttttgcgctcagtataatctgtctattcttgatttgatactgaatagaagttcctttcagcaaggtttccaatacattatgtattgtttgtttatcaacatgtatagtacgcttttgacgaacatcaatcacctgtttactatactgaaaagaatacgctgttttctcttcgatcttgcttaacacatgctccaatgatacattatccaaatgaagcgttattttctcgttctgtgcccaaccaattccagtagataacagcacaattaaaaagaataaaaaaggatactttttatttttcatagttttaaaaatttgataattatattttgtctttattgctttgctaattttagccaattctttcccgtttatattaaagactgtttagaaagaaaaccccacataaaaacacctaaaaatttttagtttttttcgtcagcctaccaatatcatcgtaaatatctgtaatactatatattaatgatatggcaaatatgaaactatttcagttcgaaacaaactttagaacgaatatcagcagatgaagaagctatcaaagcttcatattttcctggctcagcagcccatttatgctgtttgtcgtcaaagtatgatagttcttcagctgtaatagtaaacaaaccctctttcgtttcatttggctgaagttctactttacaaaagcccttcaattctttaatgagccaaattacagaaaatttcagacttttaatatatagctgtataacttcagccccaacacgtttgcctgtatttgtaattggaagagtaatacataactgcccactcttgtccatagacgtgctacttaccttggggtttccatactcaaatgtagtatagcttaagccatgaccaaaagggaaattgggtgttaacttgtttttatcaataaagcgataaccaacaaataatccttcgttatagggtatgtcataaacctcatttcctaaagcatcgacacctttgtgacctggatattcgtccaccctgtgagcaccacactgatcaagacccgcataataagtatatggaagcttaccactaggactaacatcccccatgagtatagaagcccaaacattgccagtttcacttcccaggtaccaagcttgattcttccaaggcatagctacacctgttccactgatgttgattacaaccagttttttattaacttgcagtaaatccataatcaatccattttgattataaggcaaatccattgttgttcggtccgtaccttcacaatcctaatagttacttttatttagtcctcctataaaaagaacgatatcagcattaccagctgcgtgcagagcttctgctccgatttcttctggactacggtcatccttcaagttttgcccagtttttacccccagtaggatcacctacgtatccacgggcatatatgatttcagcttgtttaccaatacgttttctcagtccttccaaaggagtaacttcatacttggctttcaaagaggaagagccacctccaacagtcatcattttaatggcattttcaccaataacagtaatacgtcttacctttgataaatcaattggaagtaaattttcattgttttgcaaaagtaccataccttctgctcctacttttcggcaagcatctttatgtgcatctgcgaccattgatccccagggtcgatcactattcatggcagtacgaaacgttagtcttaatactcgacgcaccttttcgtttaattctttatcagtataaatgccttcttttatacctttcaaatatgggtttgccaaccaatagttatcataggcattgctagccccctctgttaacccatctgtccagcttccgaactccatatccaagcctccaataatagcagtttgtgtatcatgaacagctccccaatctgatatgaccgcaccatcccactaccattcttctttcaaaatctgattcatcagtattggattataactagcgtgttcgcctcgaaataaattatagcctcccataaagtaccaagccttaccctctactgcagctgccttaaaacctggaaggtatatttcataaagcgtacgatcatcaactatcggattggaagtgtgacggttgattttattattatttaaagcaaagtgcttcatgcaggcagaaaccccattgctttgcacgccctaaacatagggtaccaccatacgactaatcaggtatggatcttctcccatatactcaaaattacgtccacaaagaggagttctataaacatttatcctaggacctagtaatacacttttgttgcggaaacgagcctcttttccaatgcttttataaaataaagccatgtcgggattccatgtagccgccagacaagaaagtgcaagaaaagccatgcaagaatcattggtccaacctgcctgatcccattcatcccacatgacctcaggacgtatgcccattggaccattagtacaccataattccggaatacccaatctgggcacaccaggagcactgaatttagattgcgcatgaataatatttattttttcctgtaaagtcatacgagaaagagcatcctccacacgctgttttattggttgatttttatccaaatagactggagtttgcgctgaagcggatataccacaaaacacaaaagcgcaaaatgtaatagttttcagtgttttaattttcatatttagcatttttgaattgtaacaaagtctattattgaaagaaagctaccacttatctcaaagaagttaaagagctgcgcgtaacccccttaaacgtcatttttacaggttttatataaccttcatcatcaaaaaacatccgttctatgcaaacaacacgggcattcccatctgtttcatttaagggatggcgatgatacactatataccattcatcatctttcaacccctttatcacagaatggtgtccagctccagtagcaacctcctcatcttgttccaatatttttccgactcgcttaaaaggcccgaatggcgaatctgccatggcgtaagctacacaatagtcaggaccagtccaatcaccttctgaccacataaaataatacttcccttgatgctttaacataaaaggcccttcaacataattgtctggagttacttccttacaaagcgagccatcttcaaagggaacaagatgcaacaaatcatcacttaatttcaccatattgcaatgcccccaacctccataatacatgtaataactgccatcatcatccttgaatacaaactgatcgataggttgtgccccgtttattatctcattgattaatggcttacccaaagcatccttaaacggcccttctggactatcagcaacagctacgccgataccaccaatttcaccttcgtggacatcattagcagaaaagtacagataatacttttcattagcataaataattgcgggtgcccatagagctttttccaaccaggatacattttctaccgaaagaattttggagtgctttttccaagtcacaagatcgggtgaagaaaaagcatctaaaaatagttgctgctcaaatggagctgaataagtaggaaaaatccagtaacggttgtcaaacactaccccttcaggatcggcataccatccttcaaataacggattgccactttcttgaacagctttcgtattgttcagtgaacacgacgaaaagaattgcccacctaacaatacataaaaaactaataatttgcactttatatttaacatatgagctctattaatcgaagtatggatgcagccatattcactgcatccatacagttaaagatgtattatgacttacttaacctcagtcagctccaacacccagctatcatactccttatttaaatcaagagcaaaaccggcattcatcaaaagatcaccggaaaaaatccgattgtgtaaataacaaggtttatcatctgcagccaaatttaattctcttatttgatacttcttgtttttatccaaaccatccagacgcacatgatgtaatcgtgggttaacatagtgttccattttaaaagcaaagaacactgcacggtctttattctcagtaacatacatcattgacgcaaccgctttcttttcatacggagaaatcagacgatattggtctccatactgaataaccgtacgaatccctttataagtgtcaatggcctttttggaaaattctttttcatctgcattcatattcttaggttgaatttccatacctaagcgaccagtcatcgcaacatcaaaacgaaatttcaatggaacaagacggcctgtctgatgattgggcgatgcacttacatgctgagccattgctatagatggataaaagtaagatgttccccattggatgaagaggcgctgcaaagcatctgtattatcactaacccaaaactcgttgaaataaggcatcactccgtagctggcacgtccgccaccactaccacaagcttgcataactacatcagggtatttagcgcgaatcctttccaatacatttattaagccacggtgataatcaatataaatatgtgattgtttatcctttggcaggtagcttgagccatagttcattatttctccattagcatcccatttgatataagcaatttccggattcttactcaatagcccatctactacactgaaaacaaaatcctgaaccttaggattacacaagtccagtactacttgtgtaccaccacggccacacattaattctctattcatagaacgcagtacccaatcagggtgcttttcaaccaactcactttttgtattagtaaattccggttcgatccaaataccaaacttaatcccatattttttagcagtatctgtaagtcctttaataccatgagggagtttttgagtgtctactacccagtcacccaatgatgaattatcttgtatacgacgatatttattcccgaaccatccgtcgtccattacaaatagttcaccacccatggctgcgaaatccttcatcatctgatccatttcttgttccttgatattaaggtaaaccccttcccagctgttcaacagaatatctctcggcttatcacagctatataccatacccatacgagcccatcggtggaggttcctactagcttcacctaatccttcacaagaataagtaagagcaagtttaggagtagtaaatacttcacgtggttcaagtttgtattcagaagcctcttcattcataccggcaaaaacatgatgcacatgactaccatacgtatcatcagaatctatcctaattttcgtacgtccaccccaacacagaacagctccaataacacgtccactattttcctgaggtttaccatccaatgaaaacataacctctgagtgttcacccaatccgttacgtactccatccatattttttataactttcatcccagaagtcaacggttctgtagtaatccgagtctcagtaccccaatgtccggatagagaagagatccacacgtcgcctctacgaatcataaaatgacctgaatcaaagcgcttaagtactaccgctttcttttcgttatgagaatattcagtccatgtttcaataatatccaaattgttgaaagcccgaaaattcaacgttacataaaaagggtaaactctgtcttttaaatgaatcactgtaagctttgcgcttttttcatccaaagtttccactttgtctacaatcaaatccaatgttaagttaccatcagcatgaaccacctgtaatgctgaactttcataagatgaagtaccaaataccggataagctggacggctcaatccattccacgaatcaaagacctgatctatttgattctcattaattctgtcaccaaaataagcaaattgcaattgctgaccctctccccacgtattcaataaaatagatgaacggggagtagaaattagtactttgccattccatgcctgaagaataccagcaggatataacaagcataacaataatacataaacgattttcttcattgttttaaattacctaagttcaagcggataatgcaacaggagtgagaatgatgacaatgagaagatacgaaaagaataatttttcagaggaacagagaaagaagatttctttcccttttgttcccctgtggaaaagttgtttctttgcatcttccagttccccaacattcagttgcaatatgaaacagctaaccgaagaacaaaggtataacatttccgcttatctgcaaagcggaaagtcaagaaccgagattgccaatcttgtaggagttcatcgtagcactataagtcgtgaattacgtcgtaatagtgataaacgtaatggcatttacaaaccggatctcgctcaggctaagtatatgtccagaatgcgttcacgaaagcacttcgtgaagtttacggacgacttgaaaattcaagtagatatactcataaagaaagatttcagtccagaacaagtgactgggtttatgcgaacaaagggcttggaaacagtttctcatgagacaatctaccagtatatttgggaagataaaaagcatggagataagttgttatacaagcatttaagaagacggggaagaagtcataagaagagaggtgcattgactaatggacgtggttttatcaaaaaccgcgtggacatagacaagcgtcctacgatagtagacaagaaagtacgttttggtgatttggaaattgacacagtcattggaatgaatcacaaaggagcactattaactataaacgacagggtaactggactagtatggataagactacttagcgggaaagatgccagcccgctaactaaagctgccatcgatgccttggaaccttttagagaccaaatacatacaataacggcagataatggaaaagaatttagttttcacgaagaaattgcacgtaaactaaatatttttgtttactttgcaaaaccataccactcgtgggaaagaggagccaatgaaaacagcaatggtttgattaggcaatacttcccgaagggtacggactttagggacataaccaatgaacaggtaatgcgcgttcaaaacatcttaaactcaagaccgagaaaaagattgggttacatgaccccaaaggaaaaatataaattattaactaacaatgaattcgacactgttgcattgtctgtttgaattcaggttattcagttaaacacattctagtaaattgtactcggattttcatttaaagaaataaacggatacgcaaagattggcgggcgcacagcgcaagtgtaaccattaaagtatctgctcatggactaatagttaaaaggttaattaatatatttatagtaatgctatctgtaatacaaagaataatacgcataatgtgttaagtaaccacacactataaatttccacctattcatgatttatagactcatgaactcaattcctccattaaaagatttaggcggccatagtattccacgcataacatttttaagacggttaacaacgtgatcaccacaatatattaacacttttttacatatagatataaaacaatttacataccttacttcaaaaaaagaactgccaatctaccagatcattctataattataaatatgaagaagacagatatactattaaataataaaggttatgtatgctaaagctatgtcaaactgaacacaaggaatgagccatatagagcataccttaacacatatccaattgatagatttttccaaaaggatcttgcataattaaaaggatttggctaattttgaccatgttctatggttcagttttttcatgtgaaaagcggggacttttctttaacttactgaatttaaggatattaccaacttaaatacttagttattaattaattagttagttattaattaattagttagttataactttattttttgtcatctatttacatatttaccaaacaattataaatctaatagttatagaacacgcaatggaagatgaacaaacaaataggacaaaaagtgcgtcagaagattctttttacataaaagagcttaaacaaggaaatataaaagcctttgagtttctatttaataagtattataaagaccttgtctatttttgcaacgtttttctaaaggaccaagaaaatagtgaagatttggtacaggatatctttgcacgcttatgggaaaatcgggaacatctcgatattaaaggtgctttaaaatcgtatcttatgactgccgtgaaaaacaatagtttagaagaactcaaacatcagaatgttattagggtctatcaagattatgcaattgctcacaatgacccatttgactatgatgtagaaaactatattttatactcagaattaaatcaacaacttcaaaaggaactgaataaactccctaaagaaatgagggaagtatttgaaatgcatcgatttaagaataagaaataccatgaaattgccaatgaattaaatgtatcagtgagaacaatagaaaatcgaatcagcaaggtgttagaggttttaagaaagaacatgaaagggttttataactttattttatattcttttttataaaaaaatggtggtatattcttttacaacagtcttataattaatagtttgttaagaattcgccaagcttaagcggctctggctgtaaataaaatgagttctttgaaaagtttgtcaataacttgcatgtctgggttaatcccaaacacgcaaataaatcgttcaagcatataagcattgtgtatgaatgacttgcaagaggatatggaataggctattccgagcctcttacatgccgctttggccaagttgacagctgcaagcgatgcattgaagtgaaaattcaactttctgaagtcagttaactgacagttggtgattcctgcatgttgctttccatctctaaagcaaaattccaactggaacctggttctgtaataatccaagacttcgcgtccatccatggaatcgtctgtagagaaataaagctgccacttgtctgtcctcccgtccatcggatatcagacggctaaggaaacataccttttgagagcttttgcatatacactcaatccgtacagctttcccttgttcacctcgtattccttgcaccgggtcagatctagattggcaaagtcaatcctgccgtcaaaccacttgggatggccaggttttcctgttttcttttccaatgttggatagtacaggactacgtcattcctgaagcggctgatgacatggaaatcactctcacacataggcgttatgaacgtttccttggaaaagaatgcgtctgcaaccaccgttctgaatatgctctgtagctcgtcttttctactgataagatagttgctataccagtcaactaggttcttacccatattatccaaggtcttacaatccgacgtctgaatggaacctaaagtcatgcattcatcgttgtcgatgtcaatgacaccgatgcccatgatttccaatcttcgcttataatccccggcacagcctgaccagaagaccaatccaaggtgtcttatgaccggacttggggatataggaaggatcgatggtgatggcttttcttttgcctatgagatgcttgctgatgatagaggcgttgaacgcaaaccggtcgaaagtttcattccccaaaaggttacggtatgtctgttccgaaaaacatccatacctgcccaattggaggaaatttatacgatccgggatggccatgaataatttcatggtgtccatgaacgttttttcaaaaggtttgtgtatattcacgactgatttgagagccgacaggcactcggattggtattgcataaggagtgtttctttagccataaccagatgaatagttaacttttaatttactaaaaaatcaacaaatcatgcagcacttttacctttgttatcagcatgctagctcactttttttcagcacatttcttcatgcttaaccattcgtttttgacaacatttcaatgacctctttaatgttttcgaaccgactcttgccggttctattatttaacttttaatatttcggtaaaaatttaccgaaatattgataatttgaaacgagattaaaatatgagagaagagaatcaatatagaatagctgaacttattctgagatatttagaaacaaaggcatcgctagaggaaataactgaactaaaagaatggattagtctttcggaagaaaatagaattttttttcaaaaaatgagaaatatttgggaaatgacagatccttccactagtcaaatgaacattgacatacagtcggcattactcaaaacaaaagtcaaagcaggaatcgaaccaggaaaaacgaatgttcccacacccaaacaaatagtactctattttcaacgaatagctgctattctcttttttcctattctgataaccttgttcaccctaatgatgaataagaaagaagagtcgctgacctattataaagcgagtacaccttacggatctatttcggaaattattttgccggacagctcgaaggtttggttagatgctggtagtacattggaatacccttcgcaatttataaataacacacgaagggtatgcatgagtggcgaggcatactttgaagtacacgctgataaaaataaccctttcatcattcaagctgatgaattggaaattacagccactggtacggcctttaacgttgctagttttacacatagcatggagcaaaaaatcacattaatatctgggaaagtatctgtttcacaaggcaaagaaacaaaacacctacttcctggtcaacaattaacctaccagcgaaacaccaaacgtatggaaataacttccaccgatacatttaaatatacagcctggaaagatgggatcatcgcatttagagatgattctttagaaactattcttgatcgactagaacaagtctataaggtccgatttgtcatgaaagaccttgatataaaacaatatacatatagagcaacatttaaaggagagaatttggatgaaataataaattgtatggaagaaggggcacctataaaattccgaaaaaggtataacgatttcaagcagggagatacacttacaatagaagtaagtaaaaagtaacccgctatcggaatttacaattataaaaccgttgatggtatcagacatacacaaatctataccaacaatggggtttatatgattggacttttaaagataaataacaatagccgcttagtgcattagtacgaggtagatgagagcacttttcagagaatggataaaatcaatagtaacgatgatgccgcggtacaaaaaaacgatatgccccatccatcaccagacagagcatatcaacagtagtctattgtataaagagagagcattttgatggcacaaagataatacgaaatccagacatatccaccgccgccgtacattttccccactaagtatatctccagttctccaaatgatggatattcaagttgtgggggaataaaaccggcggaagtgatatatattatcagtttatttttgaaaatcatgtgcattatcgttatttttgccatggaattgtgagattctttagacacagtacttttgattaacaagattttagttgttgtgttggagggctttctgtctgtaataggatgggaagctcttctttttattttttgatttatggaagatggctaataagaaaaaattgttacccggacttttttgatgtacatactaaatatatagagagaagtaaaaaaatacgggtgaaataatgactaaatgaggatatagaagagtagaccggctttgcagtctacaaaagtgagaagaagaaaaacaaaataaattcttctctctccactctggcagggtacgaagtagcctctcttcttcaatctttcatttacacctaccatagccacttcaatcaattccagtgcttcctttctcttcgggttattccttcttatccaacaaaagagtaaaagggaagccatacacagcctttcccttatcctttatctcctacaactcgaactccttttttaatctctgagccatacttacactttcagtatcaactactctcatctgataactttgccgggaagtcttgacacaccgaaatggctgccggacaaattcattggaccatcatccgcatattctccccgcttcaacttacacacataaaaaactgccgtctgacaaaaccccgaaatccttacatgtgtgatttaaaaaaaatgttcaatttcaaaaatgaaagaaacatgaaaaaagaaacaaaaagaattttggaaaaggcccgggcaggtgatgccgaggcccagtatttaaccggtctgtattatgaggacaaggaaaatatcgacgaggctttcctatggtatgaacggtcggctacgcagggattcgtatatggaatcaacgccgtcgccatatattacctgaaagggatggctgtaaagcgtgataccggcaaggcaatcactcttctagaaagcatcgcggaaaaggaacccacagcaaaagccaatctgggccatatatacctggaagggcagggatgtccgcaggatatagggaaaggtatcgggttactcgggcaggctgcggattcaggtgacggactgtcggctttcacaatggggcatatacgcctcaaagggctgtttgggactcccgtaatgtacaaggaagcgacaggatggttcgagaaggcctatgaactggggatatatgacagtgtggatttcctctgtgacctgtatgaaggtctgtattcacggggcatgagggacatcaggaaatacaggttatggtcggatgtcagaaaaagccttgaaaaaggaggttcccgtaccggtctggcaatgccatcatccgcaaacggaggcaatgtaccggtattcggggaggcaaacggcagacagtacatcatcatcggcggggagaaggcatatgtcgatctcctcgttgctgagacattcctggtcaatcctgatccgaaggcctatacggaagtggagcatattgacggcgacatgtccaacaatgcggctgataatctcagatggataaaaaagcaataaagtctatggtaaggaatatgaaagtaacattgacagaaaagattaattggacaaagtacaacctgacttatccggggctgggtgatattatacagatgattcgtacgggagacatgcaattacatgacaatgagtttgatggctatacattgaagcaggcaatagagcatatcaggagtgtagccccgggtgacatgcagaaatggaaagccagactcctgcccgctgttgcctataacggtacattcagggaacttaacggtgcgggactgattgaatactcgcgtgtgacggcattggattttgaccatatagcaacaccggatgaaatgatccggttacggaacaagctgatgataaccgaatgtgtcctgagtgtttttgttacacccagtggaaatggactgaaggctctggttttgcatgacaatacagatccggccagacatggggatttatatgagcagctactaaacatgttctatgtggctgacaggaatgatgcaggctgtaaagacctggcacgcagaaattatctgagctacgatccggacatatgggtcaatccaaatcctgaaccgtacccttatgtccccaccataaagccacaggtacagatgccacaatcatccgggacaagaacagtgtcggacaaaagcatcatcagcatcatgaactcccactggaaaaggaacaatcctgaatattggaaaaaaggcaacaggggaaactgcatcttcaggttagcctgctggatgtgcaaatggggtgttgacgaggaattggctactgagtatttcattgatggctgggaagatgacacaatggatgaaaaggaaatcagaagccatgtgggaaatgcctataagaccgaagggaagaacttcggaacattgatgtttacaatacactgatttaatcaaccctttaaaaaacaattatggcactgacaaaaagccggggtaacatgtatccttttgttacccacacgtggaatgcaataaaagggatatgttttcatgactgcccctattgttacatgaaaaaattcgatggtctgcttcctatacggtttgaccccaaggaactggaagtaaacctgggtaacggcaattttattttcgttggtagcggaacggatgcctgggctttcgatataccttcggactggattacccggttcctggattattgtaacctgtttaataacaactatcttttccagtccaaggacccttcacgttttttggagttcatgggtcatccggtaatacagaaatcggttttgtgcacgaccatagaaaccaatgtcttttatccggacatcgtaaggaatgctccaggtacccggaaacgtgccaaagccatgcaaaaactggcgagccttggaatgagaacctatgtgacctgtgaacctctgataaaattcgacttgcccgaaatggttgaacttgtcagcatgtgttctcctgtacaagtcaatatcggcaggaactcacgacaggacattacccttcccgaaccgacaaggaatgaagtgcaggcattgataaccgaacttcagaaatttaccaaagtggtagtcaaatccaatgccaagtgctggatttgagaatgtactgactgattggaaagataaaggagatgctgcataagctctcctttaaaatttcgtcaaagccaataaagaatccatatgtcaaggatacaggtgaaaaatattgcaaaataacaccttgtgagttaaccggaggcaagtttattatacatatactgcatattttattataatacccactcaggcggcgtgagcctacaacaaacgaaagaagaaagatatacaatagtttcatgcaactttttttgtcaaaatgagagattttacttaaaagaaatagattgcataaagaaaagtattgatgcgttccgtttactcatcgaagtgtaaaaagggtatataaaaacattgcaaacctttatatatgaatgagtataaacaaaaataaaacaattatggataataatataaataatatgatatcaattagtatgccgaaaggttgcaggtatatgagtgattatgaaaatctcttgaatggggaattgccattggatggtaagtttatcctgaacaagactataaccggttgtggtggtacatctctgtttctcaattcgaactttcctgtggtaataatttcgccacggcttcaggtgttgaaagagaagcacagacaataccccgacagcttccacttccatgtcccattgtgtggtaatagaggacaagcaataatccaaatgatgcgggatcttgattcgtacttggactgtcatcatggaagcacaccatttacccccttgccaatgagacctgccaagatactggtcacactggattcatcggacaaggttcttagtgtccttagaggaaataatatgctggatccatgcctctttgtggtcgatgagttccagtgtcttatgggtgatgcgacattcaaggggagtacggacatgaattttctcatccggcttgacaatgaagtgaaacgtatctgttacctgtcagctacacctgtccctgacatctaccttgactacatacctcaattcgccaacattccctactataaactggaatgggatcctgatgtgattgtggagccgacattgaaggagaggcagatgaggaacggtgagactgcggagaaactgtgtggggaactgatacaacgttacagaagggacggatattttgaaaggaaaatagtggatggaaatatagtctgttcccgtgaagcctgcatatttctcaatgaggtcaagtcgatcataaggataatcgggcaaaacagtctgaagccggatgaggtgactatcctgtgttctgaaagccagtcctcaaggctgcccaaaggattcacgataggcgggttggatacggacaggaacaatcccaggaacaagcctttcactttctgcacgaagtcatcttttgaaggtgtggatttctactcggataatgcaagtacctatatcttcatcaatgcagggaaggagtggcagacattggacatcatgctggatatacctcagatactcggcagacagaggcttgatacaaatccgttccggcatgatgccacgatatattacaagacctaccctgccactatgacggaagcggagtttgaacagaagcagaagatgatggatttgaaaacaaataacatcctcaatgtattcaatagtgctcctgaagaatacagaactgtattaatagattcttacagaaaaatggaaccagacaagaagtttacagatgattatactgacctcatacaggagaacgggcaaacgacgataggttacaatcatctggtaatggcggcaatgtggaacaggtggtaccagaggaattactattataataattcctgccaactgttgacgagcattcagtctgcggtcgggatgcggaagaagccggatgaggtgaagcagttcgagcagtggtattatagtgcatctgacaaggacaggcttgcaggatatgcgaatttcagaaaccaatgtccgcaatatgacaccctgctcttacaaaatccgttcattgatttcagatttcacgggtggtatggaactcttggttatgataccctgtcaagtcttgattttcgtgaggctgatgttgaggatgcctataatgttctttgtgcacaggctccgataagtgaggcttgcaggcaggagttcgttccaggtatgctttattccaaacaggaggtaaaggccaagttacagaagatatacgacaacttgggactttccgggaaaacagccaaggcaacagaactgaaactgtatcttcctgttcgtgaaaggcagaaattgaatgaagagggcaagagggtgtattttatcgaaactctgaatatataaacaaatgacatggcagtacgttcatacaatggatggtactgctcgttttttcttgccggatgtatgctgatattgttcagccaatggaagcaaggggatataaagtcacattatccatatatcacataaataatggtatgcgagagttaactgaaagccaattatataccatatgattattacaattgatgataatatccactcaggcggcgtgagcctacaacaaacgaagaagagaatagtatataatttcaaatcaactttttttgccagaatgagggaaattacttataaatgatatgtttcaaaggaaaaaaattgattgatgcgttccgtttaccctttcaatgatgatttggagaactggaaaaattgataatacggaaaaagtgtattattgccaaacttgccacttattcttccggttatatattcccaaaaggtagcaaaagaattgggattttattcattctagccaaggtatgattgctataaatgaagatatagcaaatcggacaatgcaatttttctgtataaccaaattactgctggatgagttaacggtacgcatcactttttttctcaataaaatctttctcttttaagtaataatccacatttcagcaaaaaaagttgattttgggatataatattttctctttcgtttgttgtaggctcacgccgcttgagtagatattactattaattatagtaacagtatgatacaatgggcttgcagttaactcttccatctcaccgtttggataatgcatgaatgatgaccttgccttttttccctggctgaattggcatacttatacattgtttcaactcctcatttgccatatacatattgcatcgggaagtatgggcaaaagtgtatcagtataagcagggatccgataaaccactcccatcacccttacaatggatccggtttaaaccaggctacatatgtttcccgttaatattgcgagatagtccttgccccggtgaatggaatgaaagagtaatgttgaagagctgatatggttacttcacggctataatcgacgggcaaacctatgacagtgccggaaaacaggtggaggaaatataaaactctctccacatacaccaggcacgtttatctattgcccgttcatcccccttgccttgtggagtattaaggtatgaaactgaagggatattatcattcagccggtaaggataaatacttaatacaacagctggtcataaagaggcgatgagtataggatataagttcagcatcggtagaaggggtatctcagtatcagtacagaaactaatccggtaaccggactctgtattggccactcatccactctattcatcattacccgtacggatttgggatgaagtgttggttatatggctacttggaaaatggaataatgtaaaatattttatatatcatataatactatacccgttctgttgggcatgaaaagacagtcttttttcttatatttatattatatataggtgggtagcgttttacacactctagggatagatagttttgcgtcgcttaaccaattaatattcaattcaaaaagtcgtatcatattgtattttccaaggagctgtattttgaacgtttacccgtctgaaatatagtatttacccaccagcgaatgatatttacccccctgaaaaaagaaaaaggagggcacctttcgtataccctccttggttcgtttcatctcaaaccgtttcttctctcatatcttttgaaagcattttttacgctgtcccggtccactccgatcatttttgctatcctcccgtatcccaacggctggccgtcctcaccgggagtatgccatagaggataccagcattcaacctcctcgtctgtcagcttacgcctgagaggtgggcaggacatcttctccatcttcggatacgcccccttatagtatttgtggaggaaacgttccatgcagtggttggcaatatatacggtcagtttgcagactgccttgcgcatcttcgggttgtcctcaccgggttctccggcgagcatgtgcagcacgatggcggcatggaaggcaatggtggccatacggggggagaccattctcctcatcctgtcatcagccttcttctgttccccgatccagttgcccagtgggccatgtacataggagaggtcagtaagatactcgtcggcgggaatgtccgtgccatcctccgcagtcctgaggcagtatttctcccgccattcccctaactggtcgcgcattctctcaagttcctcaccctccggcagatcgaactcgggaattgaacggtcctgttcgggaatcgcgcagaagcagatacgggatgcggtgccgttctcgtagtcctcatccgtaaagaagcgtccgacagctccgggagtaccggtgaaggtatagttcaaacggacagaaaaatcaccgcggcagtcatcacgggtatgcttgttgtccagggagacggcctcaccggagaatgccttgcgtagcaggtcactcgagaatccgccacctttcgaagcggatttccgtatggtgtcgatctccgtttccagtgcatagagggaaagaccccggctgttggcgatgacctccatcagccttgcctttgaaatgtcggtacccactatctggacaatccggtctgtcctgccggttctggattttagcctgttgtccatgaccaccctttgaaagaggtcctgctcatacacgtccttgaacacactctttccggaaccctgcttaccctcgataatcacctgcaggctgggtgaatgataccgtccatccagatatcttgcccgtacatttgagaaggccagtgcaccgtggccaccgagcagatggaagagcatggcaggcctgaaaccttcaggacagccgtcaagaatggtactgatgtgggggatggcagagtggcacggcatggggaattcccggttgaaccattgcagccattctccaagactgacatcttcgtgcgggttctgctcttgccccgtacttttccccattggaccgaactcccgacggatttcaaacagagcacgcgtctcgtcaatccttacctggctgagcccttttgctttccggatatcaaggtcgcactgctgttcagcctcgtcctttttgatcctgctgttctcgcatgcctcatccttcctaattacgcttttctgtttctcgttctcaatcctggcctttcccaacttcttcctgatttcgggcaatacgaacagcccgactgcaaccgtgatgccgacaacgggaccaccgattttccagaaagatgaaacggtgccctcatagctccctcttactccacccggtcctacactcgctctcgctttaatggtggaaggggcacttgcatttgaaaaatttctactcataatcaatgtgattttttaaagttgataaatcttgtttaattactgcatcgtctgtcgggactgtcagacagaccggagacttcacgtttttgacggcctgccttctgttgacatctgccagatgacggtccacggttaccaatgagacgacatacatggtagcgatttccctatgggtcatccctttcttcgacgccagataccattctctcaccatgccacgggtgacttttgttctgctcctggtacgtttggtagagaggggaacctgtgatggcacaagctcttccgcatcatttcccaccttatcaattacggcaggtgtttccactatccgaccgtatctctttacagacctcttataggccaatataccggcaagaccgatgacagccatgccaagttccattaggaatattcttttaatgttcataatattaattatttatttattggttataataatacactcagattcgataccccgaccgccactggagaaagatagccggcatgctttccctcatgtgaaagccggagaacggagaggtgtcattgtcggtgataagccttcacaagctccagagcgaggtcagcatcaaccacgatgagacgcccgtgctgcactatggcactgtccagaataccgctgctcttgatacgctgggcagtggagactgaacagccgaacagcttggagagaccggaaaggccgtatacataattcttcttgacggaaggggcaccggaagataccacctcatgctcaccggtacacccgcagagcttgaacacttcgacaaggtcggaaactgtggcctggaacaaaggcttgttaagcatatcagatatattattttcgcttttcattttatatgtttttttaattaataaaatcttatcaagcttgaatcgcgggagcaaatatagagattattcaaatacaacaaattgaattacagctatttacaaagatataattgagatatttggaatagcaggaatatagcagagagatagcttaaaaatagcaggaataatttgcagaaaaacaaaaaatccccttgtccgggaaaggacaagaggagcggataaagaaaaaatggaaagatggtttcagaaggttgggaatccggaaagaagcacaagaagggatttcaagtcattatccttttcacttataaagcgggcattctcttttagtgtagaagataccctgttgtttttcactaaatcatgactgaccatcctattgaagtcacatgagggattcttgtttatattcccggtaaagagtcccttgcatattttccatttgtcacggtaaggagcacatacaatgccgatgaacagtgagaagctcctgggagaggcaatccattcaatggatatgacaccttcaggcttcttacctttaccggtcaacacataggtaaactgctccagggatgtccttttatggaagtacttgccatgcattttatcgaacaattccttgataaccccttcatcaagagaaaggcaaaaagtggaagtggaaaaggcaacggaggattcaacgggttgtcgtttgcccgaaaaagcccccccggaagctggatttccggatgactggggactcatagtttcggaatcttgagagacagatgaaccggaagcggcgaccgtatcctctgacaaaggctcacgggatgtttccgtatgattgttttcggaaaaacgcacgtcctctttatgggggctgtcagcggaattgattgtaatattcgtggtattcgtcacattgatctggtttacatagactgtagtataaacattcgtatgacaaccgtttccttcagatgtacgactcttgcaggaagaatcatccggagaggatgccttggaagtcttggaattagacacagcggacagtttattccgtatcctcacacttgtgataatcaaagcagtgcttacagcggcatcaaaaacgaagtcagttactttctcagttactttccctaatgcagtaacagtagccaaagaaagccgtctactcgcagcgtataacatgtagttacatgcattgcaagcaatatagccaaatgcggtttccatatctttaaattttcaaaaacgatcaccatttttagagaacgccccaaatatagcaaaaatataatcacaccatatcgtccgcactgtcaaaaatagccacaatcatgtattttatagcctactcaaggagtttttatgtcttacagcatccaaaatactattcaattctgctggactaagggatttcagaatttctgtcaggtcagacctatcatcagacgaaatatccaacaacctattattatatgacacctgctgttcatgagggaaaatatctatgtagcgtgcggttacactttcattatgagaatgccccatactctcactgatatagtttattggtacaccggcatgagtcagattggtagcaaaagagtgtctacaccatgtactactcggaaaaatctcccaccccaaaaaaacgaccaacttcttcatacggtcttgaatattgctgttctccaatgctatcattttacgaatggccatttcatcagtctcacctttcaatatagaagggaacaccaaagcacctttttcttctggagcagcgatttccgacaaaatattctttaaaggctcaataattggaatcacgacttcactattattttcacttctatctttagttttatatcgcataaattgaaacgcctttttaccgctaaaaaaatagtaatcattatatctcaaccgtgcagcatctgccaaattaaagccattacacaaatactgtaacaaaaataaacctaaagaaaaatgtaccttttctctataaaccttctgccacgattctggatattgcttattaataaatacttgatacaactccgtcatctgtgctacattcaaatattctttcttccgcgtactacctgtaggtatagtgattaaagttttatctttaccaaatggatattctttcccactaagaaaacctctctgagtacactcattccatacaaccctacatgctctcagatatattccaatagtcgttttcgtaaatccatcattttccatacctttaatccatttttcaatcaaagtcttagatacattaaagcctgatattacaccaacatacttgataaatgatttttttgctgttgcataactgtccgcagttcccacagatctatttctaacaatatcatcccaaatttgcagaaacgaatcttcttcattttttcctgtcaatcgggtcataatcatagccaaacttaatttagcagttttatccaaatcctgcactatatcaacataagatttgaatgttcgttctaattgcactttacgttcaaaattcgtttccctttcattttttgtactggttctacgaccagtattctttgctctacaaatagcatcaaattctttttctgtatatttttcccctaatgaataatacaaccttttccgatctatagtaaatcgtaaagctatagggtatttattatcactctttaggtgccttctatccaagaccaaacttattacacaaataccaaccttatcattagccaaacaacttatatactctttacttttttcaaccatagttttcctcctttatacatttaaacaaaatactataatcactcatccgagaacacaagtgggaacacaacgggaacacaaaaagctccatttttttaaaatcaattccaatcagacggcatcacaaaaatagcaaatatttgattaacaagcaaatataaagtgcaagaataatcataaaaaatcatcctaaatgattcataatcatgaggtccccggttcaatcccgggtcccgctacaaagaagatttagactgttaggaggcttccactcttggcggtcttttttgtttttaatactcgttttttactatggtttgttttcaaattatagtaaaaaggaaaatatgaatacaaacagttgatatatggatagtcctcttgcattttaagccactaactttgtgtgcaaatatcaagtgactattatgaaaagacaactgttcacattttcctttctgtgtctgcttgcactaggtacaagagcacaaaataccctaaccttggaggactgcctcaaaataggtatcgaaaacaacttgtccttgcaaagcaaacggaaggaaatacaaaaagggaaatacggcatctctgagaatcgagccaaactgctgccccaaatcaatggttttgccaactataacgacaatatcgatccacccgtctccgttaccgacggttcagcatatggcaatccctacaatgtaacccaaaccttgcaatacaacgccaactttggattacagttgcagataccactttataaccagacactctacaccactctatccatagccaaaaccatggatgagatgaatcgcctttcttatggaaaggcaagagaagacctcatcctccaaattagtcaaatgtactatttaggacaggttacagctgaacagattattttgataaaagccaacatcactcgcctggaagagttgagagatatcactcaagccttctatgacaacggcatggctatggaagtagatgtgaaacgcgtcaacatcaacttggagaacctcaaggtgcagcacgacaacgcacaagccatgatggaacagcagctgaatctacttaaatacattatcgactatccggcggaagaaagaatagcactggtaccagtgaatacagaaacgattacgcccgcagcactcaccgggctgtccgaaacactatatgaactccagctgttgcaatcacaaaaacaacttgctgaacagcaaaaaacaataatcaacaacggttacatcccctccttgaacctgacaggaagctggatgttctccgcctatacagacaaagcttaccattggttccattccggcccttccaaccattggtatcgctcctatggagtgggcctctccttacgcattcccattttcgacggactggacaaacgctacaagatgcgtaaggcaaccatcgacatagagaacatcaagctcgcccaagagaataccagaaagaatcttcagacacaatatctgaatgctaccaatgacctgatgaacagtcagcgtaactttaagaagcagaaagacaattatctacttgctgaagatgtatataccgttactatggaccgttatcgggaaggaatcgcttcaatgaccgaagtattgcaggacgaaatgcggatgagcgaagcccaaaacaactatatcagtgcccactacaattaccggataaccaatctgactttgctgaagctgacgggacagctggagacgttgagcccctcaattccttaaagaggaagatgaatagagtccgtattcaaggacggatatatatataataatgagtaaacaatataatatagaagatatggaaacaaaagagaacaataacaccgcaagtacccatcaagagaaagcacggaaattgaagaagcttcgccgttggcaaatcgttgtcagcctattaggaatagctatccttatctggggaataattcaagtgacctgcctctttttgaactacaaacggacggaaaccagtaatgatgcacagattgaacaatacatatctcccgtcaatctgcgcgcatcaggatatatcaagaaaatttgtttcacagaacaccaagaagtacacaaaggagataccttacttatattggacgaccgggaatataaaatcagagtcatggaagctgaagctgcactcaaggatgcacaagccggcgccacagtcattggtgctacactacaaaccacgcaaactacagcctctgtctacgacgcctccatagcagagatagaaatccgccttaccaagctggagaaagaccgccagcgataccagaacttggtgaagagaaacgctgccacccccattcaattggaacagatagaaaccgaatatgcagctacccacaagaagttggaagctgtgaaacggcaacagaaagctgccttgtcgggtgtgaacgaagtgtcacatcgccgtgaaaatacagaagctgccatacaacgggcaacagccgcactcgaaatggcacggctgaacctctcctacaccgtagtagtagctccttgtgatgggaaattgggacggcgtactcttgaagaaggacaattcattactgctggacaaaccatcacctacattctgcctgacacacaaaagtggattatagccaactacaaggaaacccaaattgagaatctgcacttgggacaagaagtagccattaccgttgatgccatcagcggcaaagagttcaaagggaaaatcactgccatctccggagccactggttccaagtattccctagtgcccacggataattctgccggtaacttcgtgaagatacaacaacgcatcccagtccgcatcgactttaccgatttgtctaaagaagacaacagtagccttgccgccggtatgatggtaatagtcaaagcgaaaacaaaaaaatagggattaaggattagaggttagggattaaggcaaccaactccttaatccttaccccctaatccttaatctttaacccttaatccctaaccccttaacccttatccccatgccctcataccccaagaactatcctttctacaactgggtacccaaaccggtaggtatcatcatcctattcgtattctttttgccgatactgactgtgggcggtacctactcggtggcaagcaccgaaatgatgagcgaactcggcatcatttccgagcatatccagtttgccaacttcgccacttccattggcatggcagcattctgcccttttctgtataggctggtagtcatacgccggcagaaaatgatgtgcctggcaggattctccctgatgtacatcttcagctatatctgtgccaagacagacagcgttttcctgctggcactatgcagcatctttatgggattcctacgaatggtgctgatgatggtcaacctcttcaccctcataaagtatgcagggcatatcgaggcgtacgacaaaattacacccggcaacgagcccacaactgacgaaggctgggacaagctggacatcgaacggagtgcggcacaacccgccatctacctattcttcatggtactggggcaattgggaacctcgctcaccgcctggctcgcttttgaatatgaatggcagtacatacactactttatgatggggctactattactttgcatcctcatcaccttcattactatgccttatcataaatataccacccgccgtttccccatcaacttcaagcagttcggcaatgcctccatcttctgcatcacactgacctgcattacctacgtgcttacttatggcaaagtgctcgactggtacgatgacccaaccatacaatgggccacagtctgcgccatcattgctggcggcatatttctctatatcgagtctacccagcgcaatccttactatcagctcgatgtattcaaactgcgtaccatccgtatgggtttcctattctattttctgttaatggtactgaattccagcgccatgtttgtcaatgtattcacgggcataggcatgaaactggacaacttccagaatgccaccctgggcaactggtccatgctgggctacctcatcggcggtatagccactatctggctcagcgtaaaaggcgtacacttcaaatatctctttgccgccggtttccttctattggggctttccgccatgttcatgtatttcgaggtacaaggtgcaggactgtacgaacggatgaagtatccggtcatcatccgttctaccggtatgatgttcctctattcgctgattccaacctacgccacccaacgcatgccttacaaatatctttcttcttggatatgtaccatgcttaccgtacgcatggtattggctcccagcatcggagccgcactctatacgaatgtactgcaagaacgccaacagcactacgtcacccgctatgcacagaatgtagacatgctgcaccccgaagcatccacctcgtttacccagaccgtacaaggtatgcaatatcagggaaagagcaaacaagaagcaatcagcatggctgccatatccaccaaaggacgcatccaagtgcaggccaccctctctgctgtaaaggaaatggcaggatggacactctacgcctgcttgttttgcatgatatttgtgcttgtcgtgcggtatcctaaacgaaaattactaacttagcagacaattttcagtataacctgtaattttgtctgttatggatacccaacaagaacgtttatcccacttagaccgcgcattgtcaaacggagaaaacatttgtagttcagaaggtatgctctgctcctttcctgcctccctgaaaaaaccttttatgattaatggagcaggactgattgtctgccgccaaggcaacttcaccttttcacttaacatgaaagcattctcggcccaagctggcgaaacagttttcatcccggaagattctctcttccaagtgttgagcgaatcggaagacctgcaactattcatattcatttaccagatagaaccgatacgggacatcataggcaattcagtggcagccatgtacctatacatgcagctccggactgaaccatgctacgtatggaacaccggagatgaagaagaagttttgaaatacatgtccctattggacaataccctgcacttagacaacaacacctttaatggttacgaacaaagactgcttctactgggacttacataccgcatctgttccatttacaaccgtaaactgatgaacctaaaaacaacggttggtcacaaacatgaaatctttatccggctgattcagctgatagatgcacactacacggaagaacgcggcgtagagttttatgcagacaaactctgcttatcacccaaatacctctctgcactatccaagtccgtctgcggattcacggtgcaggaactgatatttaaatccatcatccgcaaaagcatctcactactcaagaacacccagaaaaacatccaggaaatcgccgacttcttcaattttcccaatgcttcttattttggaacattcttcaagaaacaaaccggcatgtctccgcaacagtaccgtaaaaaatagaaaacgttacgctttcaaccggataacgaagcgactccccttacccagctcactctggacagccaatgtaccgccatgagcttccacaaagtctttcgaaatggaaagacctaaaccactaccttgcactttagtgcccggcactcggaaataacggtcaaaaatgctctgatgataacgcgggtcgataccttttccaaagtcctgcacatacatttctacaaagtccccgtcatgcctagcgccgataaccaccctcccgttctctttggaatagcggatagcattgctcaataaattggtgagcacccaagcaatcttttcgctgtcgacaaacaatttaggcattttttcttccggatactccacttctatctgaatgccgaatttatcagcttgtacctgattggccttgatagcatactctatcagttcaatgggcttcgttatcttaggcatcatctgcaatttaccggcttccacctgcgtcatgttcaataattccccggtaatcccaagaaggcgatcagcattttccttgatgctgttcgacaattgctcctgttcgtcgttcaacacccctacccgtttgtcctccaacaactgcagactcatcagaatagcggatataggcgttttcagttcatgagaaatagtcgagataaaagtagtcttggcactgtccaattctttgaattctgtaatatttttcagtaaaatcacatcgccaagattatgaggttcgtcatcatcagcctctgtatttataatggtaatgtaagaagctttaaaataactctccttattgtctgcataaattttcaacggttctttcttttcacccggagttaccaattcacgaactaaacggcgaagcaaatcattcttcaaagaaagctcctcagccgaacggcgaattacttcctcccgtttcaaattcagcacagttaaagcctcattattgataaagagaatttccctattacggttcaagccaataataggttcatcaatactattcacaatagcttctagaaatttcttagcagaaagtatgtcgttcagcgtactggcgcgatactccgtcagtcgttccgccatccgattaaaaccatcagccacttcacgaaactcttcgtgtccactcatatccagacgtttctcataattatggttcgctatttcaagaatcccacgtgtcagttcttgaataggtttgctgatggaacggggaagccataccaataatatgatactggcaaaaatacacaccccacctatcacagaaatccagagcaatgcacgttgcaatcccggtacagcagcaggactatccggctccgtagccgtcagtatctgtagattcaccacagaaagagcaaccagcaaaataatcattccagccaacacccctacgctgagtatcaattttgtacgaatattcataatgttcctaagaattaatattatgcaagtataatcaaatctatgtttacttgtgccaaatcacgcacaaattttcggtatttcaatatcataaacaatgatttcggaaaagaaagtgacggacttcccatgcagacagttgttatctgtttctccctacaagtatccacaatgcttcccaacacatccgacgattgtacctgaacaacctccccccccagttcagtcaccaatttgaagtggttcaacaaatacctttgatttgccagaccgatacggtcagtactttctctgggagtctgtacataaagggcgacaaacgaagtattgtagcgggttgccagacgtgcagctttacgaatgatgcgtcgtggtgttttctcgttgctgctgatacatgccagaaacttctcatgacggactcccacactggtaaccacctcattctccactttcttttccacccgcaaagccacctctttcaaagccagttcacgtaattggagaatattttccgttttgaagaaattgttcaaggcagtagggaccttttccggtttgtaaatttttccagctttcaaacgggctatcaattcttccgcagtcaagtcaatattcaccacctcatctgcctcttgcaaaacgctatcgggaatacgttccttcacctcaatacccgaaatgccctgcacttcttcattgacactctcaatgtgctggatgttaacggcggaaatcacattgataccctcatcaagcaaatccatcacatcctgccagcgtttctcattccgactaccttccacattggtatgtgccagttcatccaccactactatctcagggtgtatctggataatggcatccaaatccatttcttccagttctttccctttatagaatatcttacgacgaggaacaacgggcaatccttccaacatggcatccgtaccggcacgcccatgtgtctctatatagcctatcttcacatctactccgttgtcaagtaactcgtgtgcttcctgaagcatacgataagatttacctacaccggcaatcatgccgatgtagaccttgaacttgccacgccgcgactttttaatcaaatcaagaaaatgttgtacgctttcttccctactcatttcttctgtttcttgcttgttttatatataccatataacccgcaacgatcatcacgaccgccacgggcatccaacactaattcatgagttctaaagttatatctaaataaatcatggccttaaagtaacgccgaataccagatgtgcatcttccatacgaggattccaaatggcttgtgcaaatacaggtattgagaaactgtcagtaatcttgacttccgtaatacctttcagtgccacattggttacagcaaatccactgttaggaacaccatatactcctaccccagcttcataaggcagaaatccgcaagtaaggttcaaatctacagacttgacactgaacggatagttgagttcaacatacgaagaataattctgcctgcctttgtcatctttgtcagctccggcaaacatagtgtaccaagcgattgacaaaggaaacttttcaaccggcaatgtataggctaatcctgcttcaaagtgatgcgccgtttcgtggctcttaaaattgaaatactttcttgctccttgtccgccccaccacaagctggcaacagaaaaagtcagacctgattctccaaaaacataggcagcggtcaaatcaatctccttagccgcagccccttctcctgaagaagctccgtcaaaatcggtagagccccatgctgtcaaagaaaaatcaccgaccccaaaacccaaagtaggctgaaaacttactcccgtctggtaaaagccgcgccaaacataagaactgaccaaatcaccttgtattgtaaattcctgagcttgcactttgccggttcccataaaacaagcagccaccatactcgcaaaaactagaattgatatttttaaacttttcatatccaactatttatttaccattactaatcaatcgttgaaaggcaggaaggaagtttcggctccccctgtaaaatgacagtctttcgctgcctgaacagaaatacttccgctcctgcccataacacatgacaaacacaactaaaaaattatttattctgatcggcttcttctaatgcaatgttcagttccagcacattgacagtttccgtaccaaacacccccaaaaagggtttgctgatgttcttgtctacaatggctttcacttcagcctcgttcatgccacgtgcctgagccacacgcttcacttgtacataagcacaagcaggtgtgatatgtgggtctagaccggaaccactggcggttaccatttcagcaggcacatccttgcggctcagataaggatgatgtaccagaaaagtatcaatacgggcttccacttctgccaggtattcatcgttcgtaggacttttgttactaccacctgaagcatcggctgtataatcacccgcagatgggcgtccccagaaataaatatcttgcgtaaacatctggcctacattggcagcacctaccactttaccattgagggttgccacctctgcatttcccttgttgggaccggcgaactgtgcaaatatccacaagacaaggatatagaacagagagaaaaatatgcaaaatgcaattgttattttaaatgatttccaaagagttttcattttatccaagttttaaaaaaacagactaactatcatatctatcagtttgatgccgacaaacggagcaatgacgccacccacaccataaatcaacagattgcgacgaagtagcgcactggcaccgatcggcttatactgaacacctttcaaagccaacggaatcaagataggaatgatgatagcgttgaatatgacagccgagagaatagccgtttcagggctatgcagtcccataatgttcagaggagccaactgagggatggctaccataaacaaagcagggataatggcaaagtacttggcaacgtcgttcgcaatggagaaggtagtcaacgtaccgcgtgtcatcaacaactgtttgccaatctccacaatttcaatcagcttcgtcgggtcgttgtcaaggtccaccatattaccggcttctttggctgcctgcgtaccgctgttcatcgccacccccacattagcttgtgcaagggcgggagcgtcgtttgtaccgtcacccatcatagccaccagcttaccggcctgctgttcttttttaatatattccatcttgtcttccggcttggcttcagcaatgaaatcatccactccagctttctctgcgatgtatttggctgtcaaagggttgtcaccggtcaccatcacagttttcacacccatcttgcgaagacgctcaaaacgttcctgaatacccggtttgataatatcctgcaactcaattaccccggtaaccttctgattgacacataccaccagcggagttccaccgttgctggtaattacagcaatcacctcttcaatctctttcgggaacttgtttccggcattttccacaatcttgcgaatagcgtcgaatgcacctttacgtatctgagtaccatcctgcaaatccacacccgaacattttgtttcggctgtaaacttaatcatatgagcaccggtagtattcaaatcacgcatacgatgaccgttttcacgtcccagttcaatgatggacttaccctccggagtctcgtcagaaagtgaggacaacaagcaagcctctacgaacaaattctcgtcaacacccgaagccggatgaaacttggtggctttacggttaccgattgtaatggtaccggtcttgtcaagcaacaaggtatcgatatcaccggctgtttctactgccttaccggattttgtgattacattagcgcgcaaagcacggtccatccccgcaataccgatggcagaaagcagtccgccgatagtagtcggtatcaagcagacaaacaaagaaatgatggctgcaatggagatataagttcccggatggtcgatattcgtatagtcggccataggaatcaacgtcacacatacaatgacgaataccaaggtgaaaccggccagaagaatagtcaatgctatctcgttcggagtcttctggcgagtagcgccttctaccaaagcaatcatcttgtcaagaaagctctcacccggttgctgcgtcaccagtaccttgattttatcagaaagaacttttgtaccaccagttacggaactcttgtcaccaccggcctcacggattaccggagcagattcaccggtaatggcactttcatcaatggaagccaaaccttccacaatctcaccgtcagcaggaatcgtatctcccgcttcacaaataaaatagtcgcctttcttcaaacgtgaactgctaacggtatggatcttaccgtcaaccagcactttagccggagtctcttcacgggttttacgcaagctgtcagcttgggccttaccacgcgcttcagcaatggcttcagcaaaattagcaaacagcaacgtcacaaacaagatgatgaataccaagaaattatatccgaacgctccatattccgaagtacctaatgaaaggaaacagacaatcagcatgacaaccgttacgacttccaccgtaaacataatcggattctttatcatcacccgtggattcagcttcacgaatgattgcttcaaactttccattacttgctccttctgaaacagagaagctgatttattatctttcatacctatgaaattactttttacaaactactattacaaactgaaatgttcagcaatcgtactcaatgcatgtgccgggaagaatgacaaggcagccacaataaagataacggcaaaagtcatcacaccgaaagttactgtatccgtcttcagcgtaccggcactctccggaacatatttctttccggccaacagaccagcaatggctacctgacctacgataggcaagaaacgtcctaaaatcagcgtccagccggtagtatagttccagaagtaagtattgtcgcccaatccttcgaagccagaaccattattggccgcagccgaagtatattcataaagctgctcacttagtccgtggaaactgggattattcaaccagccgccttcacctgccacaaattcaggataatgagcgaacaaaaagcaagaaagtgccacaccgcccaagatgataagcggatgaagcagtgccacaatggtagcaatcttcatttcacgcgcctctaccttcttaccgaggaattccggagtacgtcccaccatcagtccactgatgaatacggcgataatgatgaatgtataatagttcatgaaacctacacccacacctccaaaccacgtattaatctgcatgttcagcatttccatcataccggaaagaggcatcgttgaatcatgcataccatttacagagccattggaagtaactgtagtcacaatactccaaagagcagtagcagcagaccctaaacggacttccttaccttccattgctccattgtcttgggcaattcccatctcatcaatgcgcggattacctcccatctcctgcgaaacgttgatgcaaacaccgacaagaaaagcaaaaagcattacgccgtagatagagtaggccatctttctgcgtctggtgtaaaaaccaagtgcaaggaccattgccatagggataatcaggatagaccagcattctgcaatgtccgtcaggtaagtaggattttccaacggatgtgaagagttacatccaaagtaaccgccaccgttcgtacccaattgcttgataggaacaatcgctgccgtaggaccttgtgaaaccaactgggtttgtccttccatcgtctgaacttccagcttaccatcaaatcccatcggagtaccttgtagaatgaggatgaagcccacaatcaacgaaagcggtaataatacacgtgtacagctcaaaaccaagaacttccaaaagttaccgatagtcttcgtcgatttagcagccatacccttcatgatacctgccatagctgccataccggtagcggcggtaatgaattggaacaacataataacgaacaactgtgtaaaatatgtcagtccgctttcaccggaataatgctgcaaattacagttcaccataaaactgatacatgtattgaatgccagatccggtgtctggttagcgtttccatccggatttaacggcaaccactgctgtgtacagagtagcaccatgccccatacaaaccaaaaggcattcagaatcagcagggctttcaagaactgtttccagttcatctcttcctccggattgactccggccactttataaatcaatctctcgaccggcttcatgaaatccgaccatgtcttttcgcctttgtaaaccttggcaatatactttcccagaggataggatatcacaatcagcagaacaatctgcaaggctacacctaaaatttcagtgttcatttctccactctccattcattaaaacttttcgggtcttatcagcacataagtcagatacccgaacattacaatacctaatacaaataaagctgtgtacataattctctcttttaaatcttctcaaaccaatctacacatttccagaaaagccaaaaggcgaacaagccgctcaataggcaaaaaataaatgatactgttattcccatgtttttaccttttaaaatgttactacatatttttgtctgccgggaatatgccaaatatgtgccaaaaagagcgcgcatgacatacatcattaattatcaacaaaatacaaactacataagtataaaaagaaacaggttgcaccttttcattttgaaaaggtgcaacctgttttgatatgttttagtccataggcactttctgcttctaagactgtttcaaaaataatcttgccacagtcctatatcgaaggtacctcagtcgtatactgagccccctattatagaaggcgttctgagatcttgtattcctcaatcttccgatacaacgtcgtcaaacctattttcaataaccgggctgcttctgtcttattcccctttgtatactccagtacacgggcaatatgccggcgttccatagctgaaagttcaaaactgccgggacttgaatcattggagtgttcataatgggcattctgaatatcaaacggcaaatcagcaatgtccagatgtccgctctcgcaaacaatcatactacgttctatcacattacgtaattcacggatatttcccttccacggttgggagtccaatgcttcaagaaatgcgggagctatttcaaccaccggacgcgccagctgttctgcaaaactctttataaaggccttcgccaacagccggatatcacctgcacgttcgcgcaatggcggcagatgtatctgaaatacgcttaatctataaaacaaatcctcacggaaacgtccggcaacaatttcctgggacaagttgcggttcgtagcggcaatgatgcggacattgacacgggtaggtttcgtatcacctatcttaatatactcaccggtttcaagaatacgcaacaacttggcttgcagttcaaacgccatctcaccgatttcatccaaaaaaatagtcccattgttcgcttcctcgaacagtcccttcttatccttcaatgcaccggtaaacgaaccggctttatgaccgaacatttcactttccagcaactccttgctgaacgaagaacagttaaccgctacaaaattctgccgtgcacgcttactactgtaatggatggcctgggcaaatacctccttacccgtgcccgtttctccagtcaacagtacaggaacatcagttcccgacaccttctgagctaatgaaacggcatccttcagaactttggattctcccaggatagaatcaaaagagtacgtctgccccaccttcttctccagtttttccaaccgtacattcatacgcgctttctctacggcacggcttatcagaggaataatcttgttattatcgtctcccttggtgatatagtcgaaagcaccgttcttgatggcttgtactccatcggggatattgccatgcgctgtcagcagaatgacttccacattgggtgccgccttcttgatagccaacaccaagtccaccccatttccatcgggcagaaatacatcgcacaaagcaacatcaggattttggagttccagttgtttcagggcagccctacaatcaccggcctgacagacatcatacccctccaactccatcatacgcgtcagaagagtacggatttgtacttcatcatcaatgattagaatcttactcatatctattcgataagtttttaaactgataacggtaaaaacaggggtgtgcaaatataaggcttttcccgaatatcgacggcacatcttttgaacttttataaatgaaaagccaagagcctgctaccagccagagcatgaatatcccaccacggcaatgctacaacggcattatgcaggccaagctcaggtggcaagccccgtcctccccccctttcattttgggaagaggccacctgaaatgaaaagccggaaggaagaacctccggatgaatgcaattatgaaactgttaaaaaagaaacaagaaatgaaagtttgtaaattcggcggaacttccgtcggcaccgtagagagaatgaaacatgtagcaacactcattaaagatgcaacacccaagattgtggtactgtctgccaccgcaggcactaccaaccatctggaggagattgccgccaacttattcaaccgtgaaatggaacaagcccacgaccgcatcacccggctggaattccagttcatcgaatttgccaatgggttgctgaccgacgagaaactgaaacgggaagcaatagattatatcctcgaccgcttccagcaactatggaaatttaccaagaactctttcacctccgtcgaagagaaggaggtgctggcacaaggcgaacttatcagtaccgctctgatgcatttctacctgcgcgagctgaaaattcccaatgcactgctttgtgcattcgacttcatgcgtaccggccccgacaacgaacctgacttggaatatatagaacaaaaactccgagaacagcttgcctgccatcccggcatcaatctcttcatcactcagggtttcatctgcaagaatgcctataacgaaacagataacctgaaacgcggcggcagtgattacactgcttccctcattggcaccgccctccaagcagacgagatacaaatatggacggacatagatggcatgcacaacaatgatccgcgcgaggtgtcaggtacccgccccgtgaaacgcctcagcttcaacgaagccgaacaactggccttctatggtgccaagatactgcatcctttctgtatcgctccggcacgcctaaggaatattcccgtccggttgcttaactctatggaaccatcggcagaaggcacgctgatttccaacctgcaggacgacaatatcatcaaggccatagccgccaaggaccacatcatatacataaagttcgaatcgaaccataatctgtgtccctatctgttcatcagcaagattttcgacatttttgccaagtaccgtacccccctctgcctgctggtatcttccaatctggacgtatctgtggctatagacgactgcactcgtttatcgaacatcatctccgaactacgccaatatgcccatgtattggtagaagaccgcatgaccatcgtctccgtggtgggcaacatgcaatgggaatttgccgggtttgaggcaaagattatggaggcgctaaaggacatccccctacggatgatttcatatggcagcagcaataatgacgtggcattcgtcattaagaatacagacaaaaaaagggctttacaagccctaaatgataagttattccaaccggaatatgcagaacggaactaaaagaaatggttccgtatctccttcgcgatgtaacggcccatcagctcctgccccggtttgtcgggatgcaacccgtcgcgcagatagcgcccactaccggaaggctgctcaaacttttcggtgataccacagttggagtaacagtctatcagctgcacggaaagcgcccggcacaactcacgcaagatggcaatcttctgcagattcagtgcattgtgttcggggttgccggtctgaatcggcgtgcacacgaatacgcggcattggggataatgctccagaatggtctgaatggaccaacggacaccgcccgccatggtgttgacatctacttcatcgagcgtcttccctttaagggcctcttcggcactacccaagttacggtcattcgttcccatagagaacacaaagacatcgggcgcagggtaagcgccactttccacttcggctatgaacttctggatatgcacctttgacacgttgttgtgccgcatctgcaactcatgcttatcctccgtagcctgccaaccgccggagatgccggcaaaagcttcgctgccataatcctgagtatcgggatggcatgcccatgtggcagaaccgaccgccacgttgtgatgtgtagcgaatccgagtttatccactacagtcttagaccattgttcgcctgcggtaatgctgtttccgtcgcacccgaagttcagcttgctgaagtccggataaagagattgcgcgtgcagcgcaatccccatccagacaagaatccccaaaaccatcaatctattcatctccttatgatagaaaacctatgaaaaacgttcaataatttccatgcacatacgtccgttgtgatacggacatttccagaaccccgccttgtcatcatcggtgttcaccgtgccgtcggcacgcacgctccaatgccattctccgtacttgtagtctaccagatgctgcttgatgaaaccccagcatcggagagccttctgcatggccacttcgtcatcaaagtgctggtagaggttggcatgtcccactacgttctcggcctgcacccaccagtggcggtcggtatcggtctttcccttatccagaaaagtctcgtatatcatgctgccgtcgggcgtcaatccttcatcggcagcggcagcgatgtattctacaagtggttccactttctccaggagctccttatcgcccagaacaagggcagcctcgtgtatcaaccaggaagcttcgatatcgtgcccgtaggagacaattcggtacttgctcacccaatcatcattgaagaacaattccagatggccggtcttgatattcagaatccgttcagtaaaaagacctatcaaattacgaagctgcttctccagacgagcatccttccatatccggaaaaggttggtataaggttccaaaatatgcagatgggtattcatcgtcttgcgctcgttctcatccttggcgctgaggcgcatgtcggctatctctccccattcgcgggtcaaggcttcacaataaccgttcttcacggggtcgaaactatgctcttcaatcgtctcaaacaagcggatggcatatgccagtgcttcatcatcgcccgtggcacgagcatattcactcagcccgtagatggcgaaacccaaagcgtaaatctgcttcttggtatcgagcggattgcctttatagtcgagagaccagtaaactccgccaaattcattgtcgtagaaacggtcgataagagtgcgtttggcacgcgtagccgtttccaaatactccggcctcctcagcaagcggtatgcagccgaaaaggtccacaagatgcgggcgttcaggatggcccccttttcagcttcgggcttcacctcctctcgacccgtgatacggccgtagaagccgccgttcacttcatccgtcattctgtttatccagaaggggaggatattggagaccaactcctcctccatctcctgcttcatcttcttgatatccactattctatgagtttaagttataagttattctgctgaaggttctcacgacgctttttcaagtctgcattgatggctgccatacgcgtcttgttcaacgggtagacgaatacgacaagaatggaaagtgcagctatcgcagcaggaataaagctcatcagatacttcaagccatccagcgcttcgggcgtctgcacagcattctctgcagtgttgtaaccaaagaatgccaacagcgccattactgcccagccagcaaatgcaccgccgaacttctgtgccatagagccagaagagaatatcagccctgtagatgacgtaccgtccttctgctcggcatagtcggccacatcggcatacatactccaaataagcggggatacgataccggtacaaatggagataagcacctggaaaaccatcatcagccaccatcccagcccgtcattcggcacaaagaagaagagcacactgaatactaccaggcacacgagcgaaatgatataggttgacttctttccaaacttcacggaaagaggcacagccagcgccacaccaatcatattacacacttcacccaccatcaggaacagaccggcatacaacaccagattgaataccccgaaatcgaggaatgcattggcactgatatagtccttgaagaagtaggcggcagtagctccacgcaccgtattgaagaaattcgacagcaacgccgcaccgttcaatatccaccaaggcgaattgcgcaccagcgacttcacatccttgccgatagattcggacgccacactcttgacatgctcgcgcgtcatgctaaagcaaaacagaaagcctaaaaagcagagcgtggcaatacataccatggcatattgccaactggaagcattgctatagtccattgatttaaaccaattgcacaatggctcccatgctcccaaagcgataaaactacctccgtatgcaaaaaacatacggtaagaagagaaaaccgtttttgtattcgaatcatcagtcattactcccagcatagccccgtatggtacattgattgccgtatataccgtcatcatcaggatgtaagtgacataagcccataccagcttacccgttgtccccatgtcgggcgttgtaaaaagtaaaatcccagcaatggcaaaaggagctgcaatccataataaataaggacggtatttgccccaacgcgtatgagtacggtctgcaatgactcccatcatcggatcggacactgcatcccaaatacgtgtcaccagcatcagcaatcctgcatcagccaagctcaagccaaaaatattcgaatagaagaacggtaagtaataggagaatattttccagaacatagaggaagacatatccccaaaaccataaccgattttctcttttagtgttgccatagtatgttgtatttttattatttcattatctgcagattcttgtctatcagtctcttcaacgtttctaccgaggctgatgaagacaagccgtcagcaggcgtattcatgcaatagtccaccagcttgtcaatggtagaagtggctacatgcatccgcgtgtcagaagaagcgtagtaaataaatacagttccgtcttcatcggcaatccagccgttggtgaaaagcacattgcttacgtcacctatacgctcctcaccctcgggtaccataaaggccccaccgggagtggcaatcagtttcgtcggatcttccaaagaagtcatgtacatataaagcacataacgcaatccggcggcacaaccgcggacaccatgagccagatgcaaccagcctttcggagtcttgatgggatgcggaccttcaccattcttcacctccttgatggtgtgatagtagcgctggtcgataatcttctcttccttcacctcggcatgggttatgtcatccaccagcgcccagccgataccaccaccgctaccggcatcaataaagccatcctgcggacgggtatagagggcatacttgccatctacaaactccgggtgcagcaccacgttgcgctgctgactcttggtcttcaggtcgggcaggcgttcccaattcttcaaatccttggtgcgagcaatggcagctgtagccgtagccgaggacaagtcaccggcgggcgcattgtcgtcgtggcgttcggcgcaaaagataccgtaaatccagccgtcctcatgagccgtgagacgcatgtcgtatacattcgttgccggaatcgtatcttcaggcatggtgatagggtaatcccaaaaccggaaattatcaatgccgttgggactctcggctacggcaaagaacgacttgcggtcagcgccctctacacgtaccaccatcagatacttgccattccacttaatggcccccgaattcatggccgcattcataccgatgcgttccatcaggtacgggttggacttctcatccaaatcataccgccagaatacaggtgtatgagcagccgtcactaccggatatttataacgtgtgaatatgccattgccgtcttccacggccacattctttctcgtaatcagctcttcgtgtttctgaaagagcctctctaccttttctttaaaagcttccatgtctgttatattgattgtttgtttattgatacagatttacatcggctgcaaacagcgtcttgggattgttataaaactccccaaaatcctccgcagatgtctgtcccggatagggggcatagtaatgggtcaccttttcacgggcattgcgccacaccagcacataagcaagcgaatatttctttaacgcaggcagcagagtacctgtccaccatttggcatcggggattccttcgtaaccggtttcggtcacagcaatcaccttattgtgtgctttccctatactgtcgataatggaaagtgccctatccatcccggcaagataggtatcccggtcgaactgataggtatcgaagccaataacgtctatcaactcgtcgcccggatacttcttcaaatattccgttgtgtccttgggttccgtgcccggagagtaagcatagagtgcattatccactcccctggcctgcagagtgtccactgtcatgtgccacaatgtcttatactcttcaggggtacacagtttctcgccccaccagaaccagctgccactgtgttcgtgccagggacggaaaagtacgggtatcttcacgccgtccgccgtcttcaacgaatgaaggaaatcggccactcctcccaaccagccggcaaacttctgatgattctctccaccgggcaggatggacttcaccaccgtcgtatccgatacatcccaggcatcaccgcccgtttcaggattgcgcgcatgccaactgagcgaaaccatgccgccccgctgatactgattgattatctctttcctgattttatcgaagggcaccttatccagattggcggcattccctagttccaactctcccaaatcaaaactgatgacagccggatagtcgccacacacgcttttcacatccgaacggccttcctcaccttcccagccgataccatataccgtatcgtcatgatggccgagcatgatacctttggaagggattttcttcaagttagccagtaatctctccgtttcctgcgtacgtgcagcagccgtctcttcattcacactctgttctttcttggaagaaccgcaggcggtcaacagactcaccgccagcatcatcgtaacaaattttacttttctcatatccatgtttttcaattacggtattattattggtaccactaattcctagtacaaagatagcggattgcaccaagagaaaatgatacaattttatccctttactatattaaaaaacagaatataaaaaacgtatcatcttactttcaccggaacgcgcttccgcgagacaattccccgttccaccttccggcgttccagcttcaccggttcgcttgtaaaatcgggaacattgtacgagtaaaccagacggtcgtaatactcccacggattttcctgaggaagcagaaaaggcttgcccaccaccccattctcatccatacttgccagatacagacgggtataaagcccatctcccctgcggctactgaacacaaaccatcgagagttgctgctccaattatggaaactttccgtatcatcgctgttcacctcctttatgggacgcataccgccatccttcaaatccaacaaccataaatcggcttctttatgccaaattgagaaattcccgtaatccgacaaagtaaacatgatatattcgccgtcgtacgaaggtctcgggaaggagatacttttcttcatagctgccgcattgaccagcgtatctatcgtttcgccaaatgtcccgtcttccgggttaaaatctatacagcacaagctataacgtatttccttatattctgccggtatcggcttggcctccgctgcacagaaatacagtttgcgtccgtccggtgaaaatacgggaaaagtctcgaagacttccttcttctgaagcaagggggagagcagcaattcatgtgtctcgggatggtagaccagtacatccgattccaagtcgagcacttccacacgctcatccttcacagcatggaaagactggcgcgtattgttgacagaataggcaatatatttgccgcttggatgccaataagggtatacacatgcagagagagtggaatctgttttcgtatccagcatttcgcgcttcccgtctatctgcatcaaggtccctccgttctttccacggacatgcaggctcagatggtccggatttgttttgttgaaagcatgacaattcaggcacatgcccggcaccatggtattctccagcaaggaacgctcctcgaacgaagaaaggtcgcgctcataaatgcccatcttgctataaacttcatatccgggagccagcttgcggtataccaccccataatctataggatacggactgacatacatgggaaaagagcggtactgtttccactcgccatctttccggatacataccgtaaactgaaggctatcacccttgttctcctccaaaagctctagccatgcctcttgcggaaatgatactattttatcattaacatgcatctctccggactttcctccgatcacggtcacatccacacgttcgtacgctccgccaatacaattgaaattcatgggagcaatggttgcaggaatagtcacaccgatatagtcaggatagatatccggccattcatccaccctttccgggaaagtcaccgaattgctgcaagcggcaaaccaccatgcagccattatgcaaacagctatattcttcatctttttcattttactttcttagtagcaaataattccagtatgtactgccgaaacgcgcctccaacatctgccgggcattctgctgcgaggtatatatccgcgcaaattccgttacatcccgcaccacttggggcgaaatgctccacggcataccctggaagttcttgtgcgtctgtgtccatacatatatcaacgcctcttgatagctgcggggaatatggtcgtagccggcatgcttacccagcggatagtacttcatgaaacgttccaaatcacgttgctgcaggacataggccagcatatactcaaatgccatccggttccggtggttgtgctggtaaagcagccccagcatgatgtccgtttcctggctgctgaacaagaagtcttccgtatagcgtatctgcctcaaccaaccccactccttgtgggcattgattttttcctcattatacagataggtcatggcatcctccgcccaatccttgtagaagattgtcttcctcaacaaacgcaggtacttggctgccacttcgtattgcccgtttatcaggttcgtctctgccagacgcttgaagcaacggccactcttgttgaagttaggtatagcctccatcgcctcaaaagtgaaacgttgtgccgtattgaccatccccaaatgataatacgcctcactggtgggcaacggcgaagtaaagtcacgctgaaactccggtagcagcccttccgtcccgttctggtaaaactcgaacatgcggtcgcccatctgtcccatctttcccaaagcaagattcaggcaggtcacgccgaaaggtgaaaccggcgacttctcttctgccttttctataatctcctgccattgtttattacgtaccagctggtcatactccatcgcttcctctttatccatatcgcaaccggctgccacgtagtaataaccgaacaatgttaccgccaccacttgcagaactccataaaataccggtttcttcttcaaagcgggcaaagcggccagcaggaaagggaggacaaccagcaatacggcaagccctatctctatccaaggaatcactgccgggaaacggtaatatcctataccgcccatcagacggtaaatagggaattgtacccacatgcttgccaatagcggacagccgataccccacaatcctaccccccagaacactccgacaccaccccagaaattcttacctttaagattcaacaagaactcgcgtacaatcacccagcccataaagataaagtgtgccgcacccgctgtccagtaaagtagcggaaggactatcagaatgtacgccacacgcagccacttcccctttaaatccgcataccagcaggatgcagacaatgctaacagcagagccaccaccaatgacagcatcgcattttcatcacccatgaagtgccacaagacaatgataggcagaaaactcagcggataatacacatcagccgcaccctgctccttcgccagtttccaaaccaaccgttgcaacaacacgtacaaaaaagccagaatacaagctcccgcccacacgtgataatagaactgcgtcagatactcagcgatataatcggccaacccaccgggaaccgctatccgtttccaccagtagtcggcatcgaacaagaaaagctggaactgctcctgataggaaatatgggccggatatacgtttccccaaaagagaagcaccgctacgccgaaaagtatcgacagccctatcttccaagtctttttcagaaataagaacatttactatttacaatttattatttacaatctgttactctctgtatgtcttgtcatttgaattcctcagccttcagttgccggtttatccgcttgatggaagaagcatcaaaaggaacgggagtggccgacaaatcggggatattgtaggatttcaatgtcaaatcgtctttttcagggtcggactggggtagcacaaaaggcttatgcgcctttccttcggcatccagataggcaaaataaacccgcccgtactgcccgtcaccccgcttgctggcaaaggcaaaccaacggctacctgacgaccaactgtgataagtgtccgaacggttggagttgaccattggcagggaatcgatggcacccgtctgcaaatccatcagctgcaattccgtctcccggtgccaaatggggaatgttccataatcagcaacggtatagagcaggtagcggccgtccggtgaagctttcggatgacacacggagcctttctccagccgggcattccaaagggtatccacgcggtcgccccaggtgccgtgattggcatcgaacgcaatgcggcaaagcgaatagcgtaattgctgtacgctgtccggcaatggaacagctggagccgagcagtaatatatccatttcccgtcggcagagaaagtgggaaaagtttctaatacggtggaatccgccgtaagcggagacacaatcatccggtttccgtcaaaatcggcgacagccaaatcggagacggtatcgtaaacttccagacggcggttactttccgtatggaacatgggaataatcacattagacgagaacacaccataccgcccgtcaggatggaaatccccgtagacagccgcagatatcatctgtccattcttcaaggcaagcttacggagcttgccgtcacggttcaggatagtcccccctccctcgccccgaagatggaacatcgaaaggttgccactatttcctccgtgcacatgacagttcatgcatttgccgtctgtctgactgttatccgccaaaatacgctcttcaaaattctcaatgcaccgttcacgtatctgcaaggcattccatacttcataaccgggttctatcagacggtaactgacataggcgtcaagcttgtctgccaccacctgccatgcaaaagaaggatagcgtagccagcgaccgctggtacgggcagtaacagtcacttccaaagtatgccccttctccgcttccaacaatgcacgccaggctttcaagggaaacaccgccttgttcccacgcgcgtttatctgcaagctgtccgatgctccctttacactcacgcacaccgcatccaccccttcattccgcacaaggaaattcaaaggagccacattgcagggaatggttacatcctgatattcaggatagagctccaataaccggtctgcaggctgtacagactccggacagggactacaagcatataggcagcagcacagcaacagctccacaacaacctgtatatatttcatatctctattcatcgctcatcataaatcacttctcctttttcatcgtagcatagtggaaataaaaccaatatgtttttccgtatttggcttgcaaagaggcaccattaccaccattcgcctcgtacagtcgggtataatcgccaaactcatccaatacctgaggcggaatattccacttcctcacttcatccagtggagacttgttgcccgcaagatagacaagcagtccctcggcatatagtctggaaggtatccgatgggcagcaaactcttgataatcccgggcgaaagcaccaatatccttattcagcaaatcaaagcagagaaggtaatcgcatgccaacacattatcaggattgttacgcaacagatgacgaagtgaaagcggaatgtcggcagaagaacgcaaagtatccgttgcaggcaacaacaaccgcttccgttccagccattggcagacctcggccgtctgttttccgggaatacgccgttctgcccaatcacggtaacacattgtcttttgcaggagacgaagatatttcatggccgccgcctcatcaccgttcaccaggttgatttccgccaaacgcttgacagctcttgccccggtatggtgcggagaaaaaatcattcccagaatggcggcatgttcagccatcgtcatatctcccaacgcaaaccagacttcattggctgcataaatagtaaggtaggtagaatggggagccacaggcagaaacagcccttgcgaagccggttgataaccatccatcagctggtcgggaagccggttctgctgtgcattcagcaaattataataataggcagtgaacggagaacggtattcaccctctgccaacagtttccgtactttttccgaacggccgaaatacatttccgaatccaacgccaaaagatattcccgccctaaatcgggcatattgtaccatcgtgacgaccaatcgccacagccaaacagccaatagccggacaataccgccaatatgcttaccggtaagcccgacttccacgaacgtcgcatgcagctacggcacaacaacaaaacacctccgataccggttaaagcgattgtgccggaaagcggataactcaatccgcattgccttcctgcctcccaagccaccgccaacaccgtaggaacccacgcccaacgtctcatgtacggaaccaacaaacgaaacaccaccactccccaaagcaacagcacgacagccattatggccggaccacctccttcgtaataaaagaattgagtgaggaaatctcctgacagacgtgccagagccgccggatgccgcagataaccgactaatggttcgacagcaagcaaaaagagctgtgtctgctcccgatggaacagatgatagggcaatatccggaagaaaaaaagaaacaacgccaaagcaccgattcctgccgctccccattcaatgtatttccttctgcaagctttcatccaacagtttttgttgttcttccgtcaaggagccacgcaccatcttccgcatgaatgtccccaacgtattgtttccctgctctttcaaaaacagaaagttcgtttcctgctcctgcatcctcagactgtcacgtatctgtatcagatgcagtgagtcttttccggtggcattccgtagtcccgtccggataaaatggtaagcctcttgcttcttttccctcccctctttccatttctgaagggcatcattttgcggagtgcccgttaccgagccgacagagtcggccttcacatgtatggtacccggctccgtcaccaccagcagttcctggatgtagatacgcagcagatggcgcagacgcaacaccctcatctcctccccttgtccggaaaaagaaaaagaggcattggttatctttacagaatccacccgccccggtgcattctccatcggcacgaggtatatccattccccgtcgtatttcaccgacggcaacgttccttcaatcacataattctgtccggaatttctacaacttgcccaaagaaggcaactgatacagaaaagcaagatacgtgttttcatccttatacattagaatttcaacaaaggtaggcgtttaccaactgtcagcctaatattcaattaaccaaagataatatttttaatcagagattttcttcaccgccatacactccatttccaccagccaccccgggcgacagacgggagccagcgtaatcactctcggcgtatcgggaaaacgcttgtcaaacatctctttcactacagcatagtccgcaatatcacgcagatagacaatgatatgccctacatctccaaagccgcagtcagcctccttcagcagagcctccacattctcccacatccgttctgtctgacggtgtacatctccggcatacatcacttccccacggttgttgatactcgccgtaccggaaatgagtacttgccgacggtcgtcgtaatccaccgccgttccccgttcgaaactgactccatactcataagtggggttcaggtgtgtgcgggcatagagatatttgatttgtccgggctttaatcccgctacagcaaaagcgtcaagcatcaccaatgctttcggatcggcatgacgcccaccgataccggtactggcaatatagtgcgtgttctccgtcaggttctgggtgacgaacatctcattgcgtgccttgactacaccggcataattgcaatccacattctgcacaaatatccaggtacgcaggcaattgtcggccagagtacacccttcctccatcagttgcatggcatagtcgttgagcaaaagacgcatctggtattccgaattggcggcacggttgaagctgcctcccatccagaactggcggtaagcaccgtgtttcacttcatacagtccgtttggcagcactcgtgtctgcacatcggtctgcagataagcccacaaagcaatcttggtgccatccagcggaggctgttccaccacagacagcgcgcaatcggagctttccgccgtagcggcaagcaacagttccgcctggttggcggcatcactcaggaagtatcttttaaaaaccgccacggctccggacagttcttttttcagtaaagcggcatacgcatccaacacggcattcatctgttcacggtaggtctgtttcgggtcggtggcatgtatcatcacatggtattccgtcactccgccggttacaacaaatgcagccacttccgccctgcctgaaggataagagtatgatgtgtatttcatatcattaacgagagattgtttcaatcgcaaagataagttttttatccgacaaggagtactgaaaatcgcaactttcgcttgttttgttcttataaaaaagttacttttatagaaatctataaaatatacagttattaggagcgaaaatatttatcccattggcatctacaacctaaattaataggaatctatgtcaatccgtaatgagactataaaccggctttctcttccttcaccccttcaccccttcaccccttcacctttcgcattatttccctatcgttcaaccctttccggtgaaacttctttcttccttctcaccacctcatatacattgccgtacttcgtatgccggcgtttcagtcccacccgcagcagcaccgaaccgaactgcatgggattgctgccacgcatcagggcgggatgcgttttttgtaactcatcaaagatgtcggcggcagtcaggtcgaagctcttctctgccggaagcggggtacgaaacaagctgtgaaccgcctcctccacaaggctgacacgatagaaagcctcgttatgccattgcagttccttctcctccggcttggtgaaccagttgcgccgcccggcaatgagttccgctttcagttgggcaaaaatctggtcgtgctctatgcctatgcagtcgatattgtgcttcacctcgatgcagaggaagcgccggctcccggtggggtcggtcagcaggtcgaaccggttgctggtgccgatgaacgaggcgatacggggcagttgcctgaagttctgctgataggccttgcggatgttaagtaccgacatctgcatcagatttttcaataagggcattttgttgtcggcatacttgtcgaactcgtccatattgagcagccccatttccgccagcatcctctcggcttgtccctgcgaggtcagtttcaggttgtcggtgtagtagcgtgccagcacgtcgggcatcaaggcgcgacaaaagctggatttccgtcgtccctgctcgcggctgacgagaacgggagccacgctgttggcatgcagtccggacacgcccatccattgcgaggcaagtcccagcatccaggtatggaatccccgcacccagtggggccgggaagagacgcggcaggcaagcgcagtcagccggtccttgccgtcccaatcgggcagttcgtccatgtagaacaggaagggatggtaggcagggatgtaagtggaatagacgtatcggttcaagtccttatcccagcaagggataccttcggcatgggcttcgatgcagaaagtgttcagttcgcgcttgcccacgggggtgaaggcggcagagcgttgtccggcggggcggaattcggtttcgtccgtcagcaggttgtagcgaaagtcgtagcgcgaggtgaggaactcctcgatgtcgctgctcagtgcagtcacagcgcttgcggctttctcgctccggcggcgctgctcttcccgctccttccggtttcggtcggtcgtttctttttgtacgtgtttcagcctttcggaaaaggctatcagttgtcccgcttccttcaagagtcggtgttgctgtaaagtcatcagttttttcttcataaatatttttattaaaatgattattgggaggttccggggaagggaatcatcctttctttcctctcgcctcttcgccaaagttactacctgccgagggcgttttgcaaaccattctccgcttattcttcaaaaatcattcctgccgacaaacatacttatttatgctgcggaaccctttattttcagtacctttgcatggttctttacaagtgaacgccccgggtcgtccaatcgactgacccaggtcgttcaatcaaacggccagggttgttcgttcggccgaccggagtcgttcacttacaggaagacacttccgagggaagaaacaagtatgttgaacgcactaaaacctattgatatggcaatactatatgactggtacgagaatccgggcactaatgaggaagcccctgaagagagaggcctccatccccgcccgttgctcaacgggaaagtaaccatgcggcagctctacaaccgcgtgcatgcccgcagctcgctcacggtgggcgacgtgatgaacgcgatagactgcctgacgcaaatctgcggcgaagaactgcgcgacgggcacgaggtgcacatcgaagggctaggctactttgcccccaccctggaagccacacagaaagtgacccgcagcaccccgaacaagcacctgaaactccggctgaaaagcatcagtttccgtcccgacgtcaggctgaaacaagcgatgacgggagtcagtgccatccgcagcaaatacacccgccattccctgaagctttcggaagtggagatagacatgaagctgaaagaatactttgccgaccacgacgtgctgattcgcagtgacttccaagcgctctgcggcatggcacgcaccaccgcgaacgtccacctgaaacggttgcagcaagagggcaggctgaagaatgtggggaaacccacgcaacccatctaccgggccatgccggggtattacggcgtgtcgcgcgatgcaaaggcggggcgatgagggtgaaaagcggtttcaccgggaaagccgatgaacaggaggatgagagaaggaggtgaaggagatgcagggataaaaagaaacattctgcgccctaacatcagagggaatgcaaagaggaatatgaattgcatccagaaacacaatagcgaatgacagcaaaaaggcgaatcccacgacccgccttttcctaagcatccccaattatcaagaaggagcatttgctgaatattctgaaaaagaagtctttctattttcctcctccatcaattgtgatgatacgtccttcggaatcatattccaattcacagactttcagactgcgaagccaagtcttaccattgctgggagcactatcgtgatggaacagataccatttccccttatactccacaatagaatgatgcgtagtccatcccactaccggagtaagaataaccccttgatagatgaaaggaccataaggattatcgcctatggcatagcacaagcggtgagtatcaccggtagagtaagaaaagtaatagcgtccattgtacttatgtatccagcttgcctcaaagaaacgacgcatattgtcaccggccggcaacggtttaccatcctcgcccaatacaatcacctcccgaggcacttcggcaaactccagcatatcttcactcagtttcaccacacgcgaaggaagcgccggttcatcatcagctgggaagacggcacactccaatgccttgttgtcgcggtagcgctgcaactggccaccccacagtccgccgaaatacatgtaataattgccatttccatcatcaagcacagcagggtcgatgctatagctacccttgataggtgccggttgaggaacaaacggtccctcggggcaatcgcccactgccactcctatacgaaaaatatcattcctatccttcaaaggaaaatacatgtaataccttccgtccttttccaccacatcgcaatcccacagctgtcgacctgcccaaggaatatcctccactttaagcactacaccatggtcttttatttccccctgcatcacgtcagtagtagaaaacacatgataatccttcatattgaaatggtcaccgttatcattctcaacaatcccactttcccaatcatgagaaggataaatataaagccgatcattaaagacatgcacagccggatctgccatataatcgtccggtaccaaatatctcatcgtctttcttacaccctcttcaaggatacactgagcggtgtcttgctgctgcttcgtgccgcaactgcaaactaaagggatagcaactataaaaaacaaattccactttcttcgtttgtaagtattcggccaactacaggtattaaacctttatatacaacaatagcgactgtcactatgaacctaatagtatcagccgctattgttttgttgaacccatatgttacaatttatatcagttacaagattcctccttttgccttgtcagtacacattccggatgtttcaacttccatttatgtggaagtagattcaaaagttcttcttgggttgcctttttgtgataaggcatttgtgcgataacatcgttcaggtataccctgggatttaccccgtgcgccttacatgtggccagcagagaacatatgacagacatattaaccgcagcttcgtgattaccacagaaaagaaaattttttctgctcagagtgatgggccgttggacattttccgccagattgttgtcccagtacaggcggccatcgtccagacatctcataatattatcccatttggtataggcatatgttatggccttgcctgtcaaagaacttggactgtatttaattccttctgtctccatccataccttcattgcctccatgattggcctggacagttcctgacgcgtctgtctgcgctcatcatatgacaggccggcttcgtcacactggcgttctattttatagacatgctgtatctgagtcagtgcatgttgcgccatctccctgttttcatccaaagcctgctcaaaatgacggcgtatatgcaccaggcagttgagtagccgcacgtcggggttggtcttgaaggctgtttcataacctgcaaaaccgtcacattgaagatatcccttgaagttatattgatttgccagggattcgatgaccgctccggcccgtgatcccccgtcgtaatggaagatgaccagtttctccatgactgatcttaccatccagagatattccttgtcggctctgtgtttttctctgttaatgaccggaactgtagtttcatccgcctgtacatagtcacaggagaagacttcccatttgagttcttcatacagaggcttaagcagttccacggttttcttgaaccagccgtccagtgtactttcggtaaggcctttcattccaagatggcggtattgctgtatctgacggtagaacgggacatgatattcatacttctgaagcagtatctcggtaagcaggctggtgtcagcaatgcacttgtcgaccggcatcagcggcatgggagctatctctacgcctttctgtccggctggaggaagcagggtactatccttgagagcatatttgggacggatgatcaccttgacgtaaagcattcccggcttgtgtttgacgacttttgttatctcttcgcctattctacggtataaagacaagtctacgcctttcggttctattgtatcggtttccaatacgggcaagtcctctatcattttgcggttctgacgatttcgttttacgtcttccaccgattccttctcaatcttttccacagcctcgtcccgcttttcttccgcctgctgccggagtccggaaaactcgtcggcaaagaggtctggcatattaggatcatatacgcgaagtttctctgatttacgaccaaagagctgacggttcagccatgcgacctgagccgtcaactccttgatacgttcctgcagattttttatctgttcggattgattcttattagtagtagacaatgaggctatagaggcattcagcccttctatcgtcttgagtaaaatttctttttcttccattgtctatacttcttttaatgatgtaaatatactaattaacagtgaattatgcaacaatatccaaagtttactcacgcaaaaaacatgttatacatggtattccttacgttcggctcttaaccgccggagcctctgttccgggttttcctgtattccttcaaccatcatcaccagatcgcgccactccatgggatagctgtttgatttgggatcatactccggcagcttgaagcgaccggcctccaaacgttttacatacattaccatacctccgtcttcggcatgaaggagtttcattagtctgcggctggaaccgatgaagatgaagacatcaccgttcctcacttcactgttcattttctcatgtaccactccgcatagcgaactgatacccttgcgcatatctgtcctgccaggacacaggaagtagcgcatcgtgtcgttcaggttaaacatgaccgtctcgaagactttgggtaaatatttccttcagcaaatcttcagaaccgctcccgaagtgggcacgaagtccattgggaaacagcagcgcaacaccatgcggcaattgttcttcttgggaagactccgtaaatgcctgtttaaaactgataggagccaactcgtgtttgatactgctcctgtcaacggaacattttctacgccagtagtgataggttgaataacttacacctatctgttgaaggtacgacttcaacggcagctcgctttgttgcacctgcaattctaattcttcaaattcttgtctgttcataataattgaggtttgattgtattcactgccgcaaagctacaaccaaacctcaaagtgtaaaaggtgcatttcttcgaatgcttaccttcgtttcataactgttttgattgaaaatttcacatatttatataaaaaggcgaatctcacgacccgcctttcctgatttaaccattaaacaattgtactattcggttaatgcatttacaattatccgatgttacgggcgactaatgaagtcggggaggtaacgacaactgctttgagttgaaatatcctagaattttaaataatttcaaatatgctttgtactaaaaacaatactctatgctgaaatattctgtatgctaaaaaacaaaatagacaacaagcaaattgagaaaatataaattcttttcattatactgcaatttcaattttctattaatatcaaatataatacccactctgcttctatttagctttgaatctccagaaggtagcctcagaccaagaactcccatcagcaggaggaacaacaagtaccattttttcctcgttcaactggataacttcaaactcggtgggtgctgcaaccggatgaacagctggactagatgcccaattaataacccatggccaaagaatagcctcagcggtagtagtcaatgtaccaatagaccagccttcttcctttttactataattattaaggctgaacttgcctgaacgtatcaatgtacctgatggcgtaaaagtttcaatctttgtaccactcaatgtccaagtcatataagcatcagcattttcttcaccagtaggtgaaccaatagttgagtgtgataattgatcagccaagtctgctggtgcacaagaccaccaagtgccagaaccattatttgcaaaattctcgccactatcagccttataacccatatttccccatgcaccgccatttacttcagtatcccaagtccatttttttgaaccacttccacaaagcatcgcatattctgccggtacttcatagtacatttcatctacagttacaggaaattctttagttacaatggtgccatcactgttaaggccagtcaatgtaatcatttgttcaccttgcaaaaacaacaatagttcaccacttgatgcagacaacacattcacgccatttgaccattggcaactgatagggctggaacaagaaaacttgactttattcacatttttaccattaacttgttccacggttacagtagcctgaatttgatctgccgtaatgctaccggtcattttttctctgtcctcaataggatcgcaggccacaaatgacaaagaagcaaccaacagcgaaaatatcataatctttttcattgtatttcaatttttaattatcaaaaattccatccattaaagtttgcgctggcatcatcccaaccagggttttgttccaacaaaccggcagacaaatcaacctgagctttcggtatagggaagaaaccattggtagctttataacgttctttatacttaccatccctcatcactgtttgttctcctttattccaaatagtgacaccattctttttatccagcatttcttctgctataccccaacgacgaatgtcagcccaacgacggccttcaaagcaaagttcatgccggcgttcacgctgcaacaagtccaaactataaccaggaatcggagccagaccggcacgtgcacgcactcgattaataccggcagcatcctccttcaactcagattgcattaataaaacatcagcaaaacgtatcgtaatcaaatcctgatagtgagctccctgcatttcatcaccgttattagctttatcaaaagtatcataagctacccaaaacaatgatttattccaagcactgactttacctgattccatgggttgcttagccaaaatcggcgccattttcttactccacaagccacattcttccatttgcttatcagcaccaaacacataattcggcaattcttcatttacattcaaaatggaagcgcgcatacgcatatcgtcaggttcagatgttttccattcatcccaaatcgtggcagccacaggtccttgtccccagccttgaccaaaagggaatgtactttcgccaccattatcggcacgaagaccaaaataaaggataaattgattagcaaaccccatctggccatcagactcccaacctgcatagttacaaaacttcacagcaaatacagtctcctcattaccattttcagcccatcgcaaagcattaccattagcatctgttgcatttttagtatattcataatctcccacagtaaactcgttagtataaggccataagttacggtagtcaccaataagagtatgtccagaattagcaacacaatcgtcaatccaagcaatgacctccgatttagaaatgctacctatacctccttcagtagccaaaggaagcgactctttgccatagaaacccgtgtaaaacaaataaacacgtgccatcaaagattcagcagcccatttggtcgcatgtccggcttctacaaactgattatatttcttacctgacatcagttcaatagcattcttcaaatcagaagcaatctgtgcataaacctcatctaccggagttctaggaatattagtctcttgagttgtagacgtaatcaaaggtacagcaccaaacatttcaactaattcattatagaaataagcacgtaaataatatgcttcacctaaatattgtccgtgaacttccttatctgcaaatgcgtcctcttgtgcaattaaaccttcaatagcacaattggcacgaaagataccgctataacgaaatttccagaaagagtcaaactgaacatcagtagccttcatcaaatgtccatcagccattgactcaaagtcattttccccaccacctccaaaacgatcatcacatgccacttctgatacataaaagtaattggcagtaggagtagatatagattgattcagagtggcatacaccgctgttagctgtttttctgcatctgccggcgaagcaggaaaattacctgtatttgattcaataaagttctcgctgtcaagaaggtcttcacaactagtcagagtgacgactgaaagtgcaacagctgctatatatatatattttttcatattactataatgtattagaatttaatattagcaccaatcaatactgttctcggttgaggataagaacccaaatcaatgccggtcacccaagatttatcaaaaccatagccaacttccggatccaatccactataaccggtaaaagtatataagttctgaacttgtacatagagacgcgcttgctgtaaaggcatcttagggaatagtcgcttgaaatcataacctagagtcacattctgaattctcaaatagtccgcatcttcaatatagatatcagaaatttctttgaaatttacatttgagccatcagtcaaacgaggataactattagaagttccttcgccatgccaacgtttaaatacatccgtggtataattattatatcttgaatcggcaaaacggcggtaagattttgctatctgttgaccaaacgcaccattggcagtaacagaaaaatcaaaccctttatatcccaaattaatactgaatccaagacgataatcgggattcggatcaccaatcatggtcttatcattttcattgatagtaccgttatgatcacgatcggtaaagatcaaatctcccggttggggagagccttgcaaagtaccgttacctgcagccttccaagcatctatttcagcttgattctggaatacgccagaagtttggtaaccatagaaataaccgatagggtaacctacctgcgcacgatacatttcattggttccttgtgacaacacatttgcttcaccatggataataccctccgtattagcaatacgggtaacttcatttttattatgtgagaagttaacgttgacaccataacggaagtccttaccaatattatcattccaattcaaagcaatctcaaagcctctgttttcaacatcaccaccattgattacaggagcaccggtaccagctgtggctacaataggagctgtaatcaaccaatccttcgtagttttcttataccaatcaaatgcaaatcctaagcgattattcaaaaaacgggcatccaaaccgatgttcaactgttctgaagtttcccagctgacatccggatttggcagatttttggcataaccaccagtagccttactatcggttgtgcctaatgaagtagaaccgaagttatagacattatatttatcgaaagctaccgaagaaacatactggaaattattgatggactgattaccattttgtccccaactgacacggagtttcaaaaagtccatccagtttctagtggtttccatccaattttcattgcttattacccaaccggcagaaacagaagggaagtatccccagcgattaccacgggcaaaattggaagaaccgtcagcgcggataatggctgttgccatatatttttcattatagttccaattgacacgaccgaagaatgaagccattgcccagtctccccatggttcacctttaaaagaagaagagtttacatttgccgtattagtaatccaagcatggtcaaattgaccattcaaagtaggcaattgcgaaccttcatttacagagttcttcacctctatggtttcacctacagcagttttttcgaaagactgaccaattaacacatcaacggcatggctacccaatttaggcaacacataagagatgacattttccaatgcaatattatgccccaaacttgcattctgagtaacagaataagagctgtttgcagcagtagtactagcattgtatggagtagtaaatgcacgataactactggaactcatgcggtaactgaattgaccacgatacttcaaacctttaattggctgtatttccaaataagctgtagcatttaaattgtaattacgattcaaattctgaccacggttggaaaccaaatcaatgactgggttaccgatagatccctgcaaattccagccatcagccgttttatctgcctgatcgtaaagattaccttctgaatcgtacatcggaagcaacggacatgcactcaatgccaaataaacatcattccaatattggttaccttgccctacaccgtttttagtattgtaggagaaattaaggttttcaccaattttgataatatcaaaatccttacctttcaataatacatgatcagaattgatacgtgccgtatagcggtcatagcttgaggcaaaaggtttaccaaggataccatcttggttggtatatgagaaacccatcgagaacttagacatttcattaccaccggtcaaattgatggcatgattttgagtcattgcattcttttcacgaatagcgtcaaaccagtctgtccctttccaaccgttctgcaacataccataaactcttgaaccgaggagagattcccagttgttcattgcctgcccctcattgaacagaatttcatcttgcattgccatatattcctgcgcattcaacaaatcaggcattttataaacattttgccaacctacataaccatcataagagatttcaagcttacctattttaccttgtttcgtagtaaccaaaataactccattggcagcacgtgcaccataaatggcagctgaagcagcatctttcaaaacatccacactttcaatatcagccggatttaaagtattgatatcaccgcctgccacaccatcaataacatataatggagcagaatcgcctatggtacccaaaccgcggatatttactttaaaaccttcacctggctggccattgttagaagtaatattcacacctggagtttgactttgtagtgctcccaaagcacttgttgtattcagttttgcaatgtcctcacctttcacctgcactgtcgcaccggtcactaattttttcttttgaacaccataacctactactacaacttcatccagtaattctgtatcttctttcagttgaacactaaaagaattttggttacccaccacaaattcctgcggctgataaccaataaaagaaacaacaatagtggctcccggctgaacgttcaatgtaaatctaccgtcaaggtccgtaatgactccatttgttgtacctttttccaatacattggcaccgataaccggtcccattgcatctgttacagtacctgtgattttttttgtttgctgcacagctccaatagcatcgaccgatgcagcgaaaagttgcggaatataagttaggctgacagccgaacaaatccctacgagcagcgctgtttttctaaaattcaaattcatacttgtatttttcttagattaatgaattgatgttacctcttctggcaacatctatttttaaaggctaatctatctctctttgaaatttaaatagaccttattttataaagtaactgggcataacatatcactcctttctcataggcatttcccattttattagtggttaaacattgttttattatcaatattcaattaggtttagcaaaagtaggcttttatttgaaaaacatataatactataatatcaaaaaacgatacttatttaacattccttgctgttttctataaaaaacacaaaactttttttattgcaatatctaaaaggacgaaaaatgaaagggttgtttctgattactaaaacaaccctttcattttacagttcacatatcactattccataacaggaagctcatcacgggaaacgacaaattcctggctcatagcatccttccaccatgcttcatcagcatggactaccggactgccatcctcatttgtcccgtcataccacggcatgaaccaactccaacgtgcaccagatgcccattgttcagaaataagcccgactgtgccacattcactcagcgaaacaatcttgtttccataatttccggcaatggaagtatattctgaaacacaatctgcagtttccttattataaatatcacgtcccacgatgtctacatattggtctcccggataccaatcggcatcatcgccctcggtagtccaaacccagataagattatccaatccttcagtcttgaagtagttgaacatagcaatccacagagatttaaagctggcagcatccttaccccaccagaaccagccaccggctgcctcatggaacggacgccacaataccggaatatctgcatctctcaacagtttcaagtaagcagcgatatttttcaaatcttcggtaaacaccttgttttcccaagtgccttccaccgtggcattggcagcgtcaaactccgtatctgccttatagaaggcataatccttattcgggtcgagggctgtaccgttactttcaagataaacagcaactgccgtataatcatgtccaccaatgatgaggccaccttcttgcagggatttcaaaatatcctcggtaatcaccaatgtatagtctccagatatgtcaaaataatcagttcctgaagcaatctcgctccaaccactgtttttgaacgaaccttgcgcacccgctaccacatccttcacagccacgcgtatcacttgacccacttgcgcatcagcaaagacagcttttgcagcatcatccgtcatctgtacatttccactccaatcacccggcattaccgtctctccttcccatatttgggtagaagaagcttcgcctacagctttcttgggtacattccaatgccacatggcagctacgatgccacctttgtcagaccaatccttaacaggagtaatgtcaccgtaattaatccagtctgctccagctacagatgccggcagatgaacatagtcgaaacagttgatagccggatattttccagtccatccatacaccttttcggacatttccgtattccaggcaacatcggccatcatggcagaaagtgtcttcgtctcgaagttatccaatagataattgtacagtttcacagctttagccgaagtagcggcaaccagtgtcttgtccaaagcgacagtagaaaactgaaccgatacagccggagcaggcatttggttcggtcctgttactattccctcgggaatagaaagagaacaagccgtctctcgcttgggaacattcacttttacagtcagtatattgcttgcgccaagcacatcggcacttatcagttcaccaccggtaaactggatttcgctcagattgtccgttgcaaagaatatattcttgtcatatttcacctcaatggtgatttctcccgttttcactttggcagctccactctcaggagtagtagacaccaataccggtgcatccactgcagggatatcatgatcgacatcagtatcgcaggaggcaaaaataaagaccattgccaggatgagcatccatcttatatttaaagttttcataagctaacaatatttctattttttattttacttcaattgtaattttctttacaatcaaatatcccccttggaaaataagaccaccactttcctgcaatgcttttaaatcatttgcaccaagtgaataagaatatttggttgctcccgcctcaatatttacagcatctccacctgcaaccttcttaaaatctggcaatgtagtccaaccgtcaccttgccccaatttaagttgccaccaagtgctcgatgtatcttcttcaaaatagaaatttaaagtttgtcctacgacaaccgtattccaatcatatcctccccatgcaaggtcttgacacccatttgcccagttccctagtacaacgaaaccttcccaaatggtcgcttctggagccaacacctccatcgttacatcagatgtaaattctttaccctcataattaaccattctaatagccgtcacaccagttgccgctgttttgggaaccgtcatttcgacctcagtttccgtacgtttaccaaacgccgtcactttaacttcacctatatagaatgcttctacggtattcaaatttttacccgtaattacaaattcacgaccttgaacaacagcactcggattaattgtagcaatagcaggatcagtggcaggagtgatattcaatgtcagagtagtcttaacctccattccattctttagaatcaaagttggagcacatgtttccgcaacgcccggcactgttatgcctaacagttcatcgcttatatgattatacttcgcaagcattgctgtcggtgaatcctcacctgcaaaaacaatagctgaaactaaatccaaatctgtaccagcaattatcaatgtatcaccagccgtcaaagcagccggagtaaatacagcaatggtaggcttcaatgttttataggcaatagtcacactttctccattgaacaaatttaaagcaatatctccatcttgagccaattcaggaacagtaagtgttatctgagtagcagacgctccctgttttagttcaacagcctcagaaacattcgggaatgttgcactgacaatcaaatctaaatctttacctgtaatcgtaatatcagtaccattctttactatttcgggaacagcagacaagtccgtaggaactactgtagcaattttacctgccgcaacttcagccccagagtaacataccaacgtcacagctccgctcttagccgtagccggaacaacaacagtcaatgttttagcatcctcagaaacagtaatttctgaaacttctacatctccaaatttcacagaagaaacccaatttaagttttccccttcaatcaccaatgaactaccagccttgattgtcccagtactactttttgtataggtaggaagtgcaacagtcaacatttcctcactatatatccaattagggatttcagctccgtccgaaataataatctgccccgttttagcttcaaccggtactttcacttttatttccttacgttcttggctttcgaattcggtcacaataacgttatccgcgaaaataatttctttaatgagattcaaatattcgccggtaattgtaataacctcaccaggattcacttctagaggagaaacagatgccaaatcaatcggctccgtaaatgtcaactctgtttttgttgtaatatcccccttcggagtcttcaagacaaccaaccccggctgggctgtctggggtacagtgacacggatttccgtatcactgaccacttcgatgtctgttatatcgtcgcaaccgggaatagcaacggcagtcaccttatccatgccactgcccaggaaacggagtacaccgccgcgagctacgggactcggtccgaatacattcagattgattccccctttatattggttggtatcttcatcatccccattgtcgcaggccgtaaacgtcaagcaactgaagagcatcaggcacatcatccacagtgccggaaatttatatgttttattcatatcagtattctatttaaaaggttattcaataggtaccacacggatgttgtcaatcataatcaccggattgcaatccttaccttccacaccacctgcccagacaaagaatgtcaatccggtcagcatagtcttgtcaaaagccctatcacacttattgccttcatgcgtcttgttgaactcggacagattcatggaaacggttgtccatttaccgcccgtatcataggaacccgtattcttccagggcaaccataaacctcgcggcacattcgtatcactaaagtaagcattgtttccggtcgcatacgtcaccacatcattaccagtaaacattacttgcagagcacaagactgccacggattggaagaaggaatattcacctcaaatttcagttgcaaaccattgacaccatactcctcgagcagttctgcaaactcaggacgtgcagaaagttcgggataaccggcagacggttccggccagtaattgaatgaaaaatgttcttcatcccaagtagcaccgattccccctttaagttccccggcaaaacgaatatatgcaccatcaatactattttcatcggcttctttcaataccgcactaccatcacgccaaccatgagcaatagccataccgccatgagagccatcccagtcaaagagtatgttgcgggtatcatgatagcggaatttggaacgtccggtaccgtaaatagacttcacgttgatatagcctgcaggagcattgtccggaagaataaaactgaccgcagtcttggttatgttcgtaatattagtcacttccacattaccggccatcgtaatggtcagtggcacattcgggtcatcaatgaaatagtcaccaatcagtgtcacctcactacccggctttgcaaactcacaagaaatggagttcacggtaggagccggaaccaacaccttgaagtcataatctatggtatcttttgctctggtcaccatataaatcttatcggtcactaccgaaggaatctctttcggaacatctaccataagtgtatggtcagtgatgtaacttgtattaagtatcgccttctggtcattgaaatagagctcgtaaacactccgcagattctcaccgaccagacaaatcgtattcgccatataggcccccgtcagcaaagaatctgccgcagccggatcagggacacgaacatacttcaaaataggctttccgcctgccacctcatatttatccggttcatcctcacaagctgccatggaaaagcttgctgcgacaacaactgccgcgaagaaccaattcgtatatctattatttttcatcttttcaagcattaaattaataactgaattcagaacgcacatctacgtgtaccgggtctttcatcaaattaggattgaacaccacgtcttctgtcgggaacggcaatgtaaaactggaaactgttacattcggtgcctttgcatccgggttgtaacgagtttcatccggatttaccgtccaactaccattctcataataagctttgtaggtagtgcccagattataataaacatcacggcgctgcgccttcagctcattgatagcacgctgggaatcataatatgccaaacgtacataatcataccaacggtcaccttcgcaagccagttccagccgacgttccttccagacgtcctcccaagtaatggaggttttcggagtaactcccggaatggcacggccacgtactgcattgaaagcatccaatgcactctggtctgtagtagaggtagccagtcccattttcgcctcggcatataccagatagatatcggacaggcgcaggatatgggttgccaggccgctgtacatattaccagccgatacgcccaagcccaatagatggtcattattgttaccataaagatgcttcacatgattggcaccggtaggagactgataatcgccattagggccacccttgccatattcggcatcatagataaaccgcagataatcgaatccgcccttgtcctgccagaaataactgtatacatcacctgccatcatcatggtagccttacgacgggtatccgtatccgaacgagtctcagggctttccaaagcggaaattccaaatgcatcctgcaaatcaaccgacggatcggcataaccgccccagcagtcaccaaattcatcgaatcccaccattgccaagtccgactgcaatgtattctgctgtgtccaagggtcacgtcctgctgaccaatgccaagagaagaggcactcttcattcttgttgttagccaaacggaaaacatcggaatagttggccagcagattacgaccggaattattaattacatccttggaatattctgccgcttttgccaaatcatccgcattgcgagtaccggaaagaccactcttggtcagatacaccttagccaaaagaccttcggcacaataacgatcaatacgtcccgtttcgcctctggccggaagcaattccatagctttctccagagtcataatgatatactcgtacacatcggctgtctccaccttgaatttggagttataattaccggaattcaattcagccgtattatcatggataatgggtactgccccaaaactacgtaccaaatagaagtaagccatggctttccatgccagacactcgcccatacactgatttttcacagcttctgacgcatttgccgtcttcaaacgagtatatacggtattggcatgaccgataactgcccacaaagaataggacatattcacaaggttctcatccgtaccattcaccgtaaaattcaggtaaggactgtttccctcgtatacatttccggacaagatttcaccgactttaataaaaccgcgctgaaagtcataccaaggtgagttataaaggtaattgactccttgcacacattgctcgtcattctggtaaaaattcgattcgttataattatcttcagtaggacggtccaggaaatcttcgcatgaaactgttcccataccgagtacagctgcaaacgcccaatatttaatatatctgattttcatgttttcttcaaattaaagtgttagaatgaaacgttcaagccgaatgaataaactgtaggagacggataacgtccgttgtccagaccatatacattgacgcttgaagtactagcaccaatttcagggtcatagccatcataaccggtaatggtcagcaggttctgaatattggcatagatacgcaagttgctcagccccaacttatcaatcgtctttttcgggaaagtatatcccaaagagatattcttcaggcggatataggaaccatcttcaatataacggtcactgatacggtcgttgtcattcgggtcattgatagtggcgcgtggaatggaagctcccgggtttgccaccatgacgttagacacatcattataccacatggttccatcttcgtagaccttgttcggattgataggaacaagctgtgcacgtccgtttacagcattcaactggttggtccatggagagttcatatgcgtcagcttcatggaaaggtagttgtacaccttgttgccataggaaccgttgatgaaaacggacaagtcgaagttcttgtaacggaaagtattggtccagccaaaagtaaacttaggcatcggagaaccgatattggtcttgtcatagtcgtcaataacgccatcgggcacaccgtcaggaccactgatatccttatatttcacatcacccacccatacggtattggtacggtcaaatacaccgtttgccgggtacttggcaggtttcggagaagtctgaaggtcctccaggtccttgtaaacaccatcacagacaaatccatagaagttataaagtgattcgcctacactggacacactgactacatcggtccactgtccgtaacctacaatctgggcattggctgtacctgccaatcctttcagtttgttcttgttgaaagaaatctggaaatcggagtcccattcaaacttacccgtaatgggatgcgtgttcagagagatttcaaaaccggtattctctatgtcaccataattacctttcggagcagccaatgcagaagaaacattgccggaagtacccatataagaaggtaattgcaacggcatcaacatatcactggaagttttcttataccactctaccgtcaggttgatacggtcgtgcaggaatcccaaatccaccccgacgttccattgctcctgagactcccatttgatggaagtgttcggtatattggaggggcgataccccatacccagaccagaaggcatacgattcatggatgtaccccaggcataaccaccgatgttggcattacctgtttgtccccatcccaaacgcagcttaccgttgctgattaccttcttcaacggttcaaagaacgtttcattggaaaagcgccaggaagcagccaacgaatggaagcctgcccaacggttttcagcgccgaagtttgaagaaccgtcataacgataggtataagtacccagataacggtcggcatagttataagtcagacgtgtaaagaaagatgccatggacgaacttccaaaacctgcgttgatagtcggtgttcccgtacccaaggccggattgtgcacttcatccgaaggcagaccgctattgaacacactcgtgaagtcatagctggactcccagcactcctgacccaccatggccgtataatgatgcttgtcgcctatgtttccggaataggtcacatagttcttcaattgccagaatgtactgctgttcttctggatactgctttcattgctggaacgtacccatccacccaaatcaaccatcggcttgtagcgttcacctttgctggaactgatgtcataacccagttcggcatgccataccagatttttaatcggagtgacctcaaagaaaatattacctgtcagtttctgacggtccagcaggatgtcatccatcatggcaagggcaatcgggttaggattcgtatagccttcgcgaacaacggtggcatagctgccatccagattatagataggtatatcaggaagagtggtcaacgagtagttaatcaaaccttcatcactgtccgccagtttcaggtcatcacccgttgctgtataggtggcactcaaaccaagtttcaaccacttcttcagttgagcgtccaaattggcacggaagctgtaacggttaaagtttgaaccgatgatggtaccgtcctggtccatataggaagctgatacgtagtattgtatcttctctgtaccaccttgtgccgaaatctggtgctgatgctgcaaagcagtctggaagatggcgtcctgccagtttgtacctactcccagcagagagggatcagcataataactactagggtcagagatttcacccatgtttgccaaatcattataataagtggcatactcacgcaaattcatcatatccaggcgctttgtctggcgttgaacggcaaacataccgtcataagtaaacttagcctcacccgccttaccacgtttggtcgtaatcaaaaccacaccattggaaccttgcgcaccgtaaatggcggttgccgaagcatctttcagaatttccatactgacgatatcagcagggttgatggtggaaagcggagaaatggtggaaaccgagccatcacccaatgcatcgcccaaaccataagatgaaccgctttgtccctgactctgtacaatcacaccgtcaattacatacaacggctcggcattggcattgatagtggcctgaccacgtacacggatagaagaggaagagcccggagcaccggaagtgctgacagccgtcacacccgtagcacgtccttgcaatgactggtcaaggttggtaataatagagcccttaatcttgtcttcactcatggaaacggaagcaccggaaaggtcgcttttcttcatcgtaccgtaacctaccacaacaacttcatccaacatttcagagtcttccttcaacgtgatgttcaccgttgtctggtccgttatctttatttcctggctgacatagcctataaaggaaaccacgatggtagctcctggtttcacattcaaggcaaaattaccgtcaatgtcggtaattacaccattcgtagtgcccttttccaatacattggcaccaatgatagggcccatcgcatcgctgacgacacccgtaattttctttgtttgctgcactgcctcaacggtatccaccgatgatactgcgaaaagctgaggggtataacccaggctgaacaccgaacatatacccgcaagcagcgctgtctttctaaaatttaaattcatactgcatttcttagatttaaaacaaacacaaaacctcccaaaagaagatttttttagttaacaaaatgagagtaagtcaagaaaccgtgacatgcaatcaaggcgttgacacttaaaattacttccaaacaattcatgttttcacagcatcattcttcttttcttccataagcacaattcttttttcttaattattaatggttaaatcatattgtttttaaagggctattttttcagtgtcgtcaattcgtcacgaaccattctcccccactctttcatgtctgcatctttccagtttccctcggaagaagccgacggatagaacatggagcaagtctcatccttgtcagacaaagaccaggccacccagctgatggaatgccgctgcatccactccagccaattcccccactcttctttattgatggggccgtccccacttgcctccataccggcacattcggaaacgaaaatcggcaagcccttgcccagagcatagtcggcgcggtcgcgcagccactgtccgtgggtattggcataaaagtggagtgtatacattatattgctatatccggtaataggatcgtctgcagccaaatggatgtcctggtcccaatgcggacaacctacgaggataacggcatccggctctatggcacgaatcgtcttgataacctccacagagtatgccttcacctgctcccaactgtcttccaccggttcattgaaaacctcatagataacattaggaacccctttgtaacgggtagccatttgagtgaaaaactcctttgcttcttcctgccgcagattgtggctatgccagtcgatgatgacgtaaacgccgttctcgatagcagcatccaccactttcgtaacacactcaataccgaactcgggcttgttcacataacaggcgctatccaaatccactcccatagaggcccgaagcacttgtgcgctccagtcattgaccagataagcaaccgaagaggcattgtagaaacgaggccagaactgatgccagccatagctgacaccgtgcaataccaccgtatcgccttcggtattcatcagctgcgtacccttgaccaccaatgccggtagcgtttcctttacattttcattcttcgacgggtttgttccacaaccaatggccatacctaggcaacaaaccgccaacataactttccatatgcttttcatatcatacttagtatttagagttatacatctttcttaataacagtacaaacgctttgtacacgcttacattctaattttcaggcagggattacacggaaaaacacagataggttcaattttgcaacttccggttttccgctttaattatttcaatagtgctgtctgtggcaaagacagagttcagcccttgttgttcttgagccgggtcacccgtatagtcatctcccttttcccagaatacgtggccgggattttgtccggcaaaaccaccccatgcccagaagttgcatccggcaaaaagtccacctctctcacggtcctggcggataaggtcgaatacataacggtaatattcgtcgcgggcagtggtcggtgcctctttagagaaactgaaaccgtcacgggggaaaccgaactcctccaaaacaatcggcttgctgtacttccgagcaatgaccatgtggtcatctatatacttcttagtattttccttggcacacggaagaagttccttcaggctgtccgccttcacccaactccagttgtaaggccagatgtggatattcagataattgatgttggggtcggcatgaatcttctcgaaaagattcatatccatttcgcatccccacgagccctcactgccagaagacaccatgtggttcgggtcaagtgacttgatttgtgcagccacatcggccatccagcgagcaaacggttccttgttctcgtcagagaaagcgcgaggctcgttaccaatctgccaagacataatagtggggtcatccacatattttatctgattatacctattggtgcgtgaaacaatataattgacatgattggcaaacaaggccttcgcgctgtccgattgggggaactgcttgacatactccatataggcgggccatccgtctacggcaggtaccacggcatcaccgtgtccggaccattgcaggtaaacggaatagccaccgctccattcccaggaattgttcaaatagaggacagctgtcatatcacgttcacgcagttcattcataaaataatccaatccggctaaaatagtatcattatagacgcccggtgccacttgcaaagagggctctacccgcgtctttatgccattttcaccgtcagcacccaccaatacgcgcaggttgttgatgccaatacttttcagaaagtccagctccttatgcaaccgttcacgattgccgccttcaccttcggaaccaagaatagcaccgtaccagaaattggcacctacaaaataatagggttttccgtcgcgaacgaactgtccatcggcgttgaccttaataaacgaatgctccgcaggcttaggggcacatgctcccaaaaagaataaaagtactgtcagcaaaaagaattgtttcttcatattatcagtttttaagcgatacacaaagatacgcggctcatatcataaaaaatgatactatattatcagataaatgtgctaatgtgccaatagcctgcggcatgatggcgcagcataaatattacgcagccaattagcacattagcacattaatcacattgacacattaagttgtctccgtatccaatccagccattcatcccactgttcctgataccagtaatgcccggtttccagataaagatgcaattccttcggagaagaaatcacattgtaggctgcatacatggaagtgggaggacagacttcatcgttatacccccaactgaaccaaccgggcacattcagcaggcaggcaaagtttgccgtatcataatagcgtaccgtttcaagctgcttttcatcgggagtaccgtaataatagaaataatggggccaaccgcaagcacgcttcttgaagaatgcttcgtggtcgcataaggcaggatgaacagccgccagaaaagtaacgcgtgaatcaagagccgccgtaatcacagacaaggcaccgccctggctggagcccgtaacacccagcgctttcccgttgtactgcggcagcgaacagataaaatccacagcacgcaaagcgcctaccaccacacggttatagtaagaagcatcccggctgtcgcggccgaacgtccagtaattgctcagcgccccacctgccagcgcatcatatacagactgctgcatcgtgacgggaatgccgtggatacccacctccaatgtaatcacctttccaggagccgtatacgtatctcccgcataagggcggacacccgcaccgggcacacgcagcaaagccggatacttcccttctttcttgggaatactgagaataccgtaaaaacgtcctccccaagcttttgtctggaagctgacctgatatacattatccgtttccgtacagcgttcgggaagcagtgtcataaggggattcaacggagtcttgcgcgcctcttccaaggtcttggcccaataatcccgaaaatcggcaggaagtttcgccacaggttgcagctgctcgggagcataggccgatgtagccagcccttcataagtccggccgtccacatacgccttgaccttgcaacgcaagaagcctgcagtcttcatcgtgccttgcaacttcaaggtaccatctttcagcaccatgtctttctttacttcagtaggatacatctcgggccccagttcatagtcaatcttgacatcgggcaagaggttctgtgccttcagcacccggacggtaaacgtacacttctcattcagacgatacacccaatcgctatggtcgggtgaaacgactacacggatttcattgccacgtatctgcgccgtcacagcacatacacacagcagacataagaataaggaaaaaactcttttcatgatatcagatattagtattaatcattggtgcaaaaataggcacttccaatgaagaataccaatactttcttatcatatcaccagcttctttttccgataattctcacggaattccttcggcgagcatcccttcttccgcttgaacatacgattgaaattggacagattgttgaagccgcagtcatagcacacctctgcaatggtacgcgtggaatctaccaacatacgcgtggcaaagcccagacggatatcaataatgtagtcggaaagcgtcttgccagtgcgcaggcgaaagaaacggctgaaagagaccggtgtcatgcccaccatatcggccaatgaagccaaccggatctcctcctgataatgggtggaaatgtatttctgcaccttctgtacccggcggctgtcagagaaagtctctatcttggcaaacgaagaactggacagcacccgggcattgtcatagagggaaagttcgtaaaggatacggagaaagttcatcacggcataaaagccctgctcctcggaagccagcttatccagccagttgtacaccttcatgatggcctgcatggggaaactaagtccgcactgtgcacgctccagcatccggcggatactgtcgaactggttcttgttgacaacgttcccgaagaacaagtcgggagagaactggatggtaatctcccgaatatccccggaggtacattcatgttgctcccatacatgctccaactccttaccggttatcagtaccaggtcataatcaccgataatctcggcagaatcgcccaccacacgacgtacgccggaagcatgttccgtgaagttcagttcatactctgcgtgacaatggatggggtaggtaaattctgttttgtgacgatcggcaatatagaaacagtcacgttccgacagaggggttatctccctcatgatatagttctggttttccataggcattggttaaaaaaatatcatgccacaaatatactcattctttttaatcccacaacagtaccatttgttacatttagaggtaataattgttatatatgagcagatacccgggaaagtcccgcccggaaaagcaaaacttccgttcttctcctcctcaagctctaatgtaaggatgtatgagatgtatatctcatgttgtacgagatatacatctcatacaacacgagatgcacatctcgcacacttacacactatagtttgaggaagaaagaagcggagatccctctcttgccccatagacaaaagaaagatctccgcttcgccggatgatatgaatgataagctgcttacttctgcagcttcaaaacgcaggaagtttccggcaggtttttcgaaacgaccgtcagtgtggcttctcccgcttcgccgatactttgcaacagcacctgtgcaagtccgttgaatgcttttacctgataggtgcgggcatcggcgtcggccggacgttccgtagcctgataagcggggtctccattccccaccccaaggatgcgtaccggaccggagacggttatcgtcaagtcgttgcaggcagtggggacaaaacgtttcttcttgtcctgcaactcaatgttacacactgccacatcccgattgtctgcctgaatgacggaacggtctgccgtcagggagatacgggcaggagcaccggtagtctccacagtacgggccaatatttttttgccgttcttatagcctacagccttcactgcaccgggctggtaaacggctttccaagaaagatgaccgtttcggggcatcggtttgcgctccagtttcttgccgttcacggtcagttccacttcatcgcagttgctgtatacccaaatatcaatgctatcaccttcgtgaccttgcagattccagtgaggaaggatgtgcagcaccggctcatccgtccaccaggacttcagataccaggcttcgtccttgggaaagccacagtagtccagaatgccgaattgtgagcccgtagccgggaacttcatggggttgggctcgccgcggtagtcgaaacccgtccaatagaaaagacccgccaaatagggacgttcgtcatagaatttccagccacgctcgatgcagttcagcaggctgtcaggtccgttcggcttgcggttgtgcgccaccatgtggcctttgtcgtgggcatcgaagtagatgccgcgcgtaccacagcccgtagtctcttccgaaccgagcgcacggcggccgggataatccttgcggtgctgctctactggattctgaaggatgtagttataaccggccacgtctgcgggaatcaagatggcagggccactgctcgaagcaacggtcatgaggcgcgtagggtcgaaacggtggcaatattcgcgcatcgtggcagcaatgcgtgtaccgctttctttccactcgatgccccactcctcgttgcctacactccaaaggataatgcacggatggttgcggtcgcggtctatcatgcgtttcagcaggcgagtatgttcctcgttgacacccgtcagacggttttcttctatcacaaggatgccgaggctgtcgcaggcatcgagcatttcgggagtcatcgggttatgggaagaacggtaggcattgcagccgaacttcttcagttccttcagtcggtacacttgcagggcatcgggaatgccggcacctactccggggtggtcttggtgcatgttcacacctttcagtttcagaggctgtccgttcaagaggaagcccttgtcggcatcgaagcggatgtcacgaatacccgtagtagtggtataagcatccaccagcttgccatgctgatagacttccgtaagcagtgtatatagataaggtgtattcacactccaaagatgaggtttgtccagcgctatttcaccgacggtgagctggcggtctttcggcagtaccggcttaccggccgtttcgcagcgtgccacttccttgccgtcggcatcccggaggatatggcagaggcggtaatcctccgtttgcagaccggagttttcaacagtggtctctatcgtcagcttggccttgtcaaaaggtgcggccagcgtgctgtgcacaaaggttccgaaaggagctacatgtaacggcgccgtcttgttcagccatacatggcggtagatgcccgcaccctcgtaaaaccagccctcctcgagcgtggcatccgcacggacgcagataagattctcttctccgtaattcaggtattccgtaatgtcatacacctgcgtggcatagccgctcggttcgtgtcccaggtagaaaccgtttatccagatacgggcatcacggaagataccgtcgaactgaagataaagatgtttgccgaggtcctcttgtggcacggtgatggtctttcggtaccatcccacagagttttcggggaatttatagccgacggctttatagccatgactgtggctcgcttctttggcataaggcaaatcaaccacccagtcatgcggaagattgaccgtcttccagtccacaccccacttctccggattgaacttgggagagtaagggccctcattatggatagaggctgccttggtcagatagttgaagtactccgttccgcagccgaagtctttctccggtgaggaagcattgccaaaagcaaactgccagccgtcgtccagcaaaatacgttcgcggacggattgggcagaaagagaaaaggtaattccaagaaggaacagaaatgcgaataagtgtttcatatcggttaatcataaaatgtgtttacaaagatagagcgaaaaagattcgtgcggtgatacttttgtatcattttccggtacttcatgtttccgagggaaaaaaacacgccgggcaaacaagggtgataggagaaaagtttttaaatttgaagcgtgcttccgggaaaatggccggatggcacaactaatgaagaatgtatcaaactaaatacaagaaataatatgcaagacaaaagattcggatatttcgatgacgacaaccgcgaatacgtcattaccaaccccaagacaccttggccatggattaactacctgggcaatgaagatttcttctcactcatctccaatactgccggaggctattccttctacaaggacgccaagttccgccgcatcacccgctaccgctacaacaacgtgccgatggacaacgggggacgctacttctacatcaatgaaggcggcaacgtatggtctcccacctggaagccctgcaagactgcactcgacagttacgagtgtcgccacggcatgagctacacccgcatcaccggatccaaagacggcatcgaagccagcctgctcttcttcgtcccactgaagacctggggagaggtgcagaagctgaccttgcggaatacttctgccaaagtgagaaaactcaaactattctcctttgccgaatggtgcttgtggaatgccgctacggacatggagaacttccagcgtaacttctccacgggagaggtggaagtggacgggtctgtcatctaccacaagacggaatacaaggaacgccgcaatcactacgccttctacagtgtcaatacacccgtagacggtttcgataccgaccgcgaaacattcgtgggactctacaacgagtttgccgacccggaacgggtagtagaaggcagaccgggcaacagcattgcccacggttggagtcccatcgcctcgcactatctggaagtagaactgcaacccggcgaaagccgcgacttcatcttcctgctgggctatgtggaaaacaagcaggaggcaaagttcgaggaacgtgaagcatctctgcatgaagcgttcaagcagagtgtaccctcttcacctattataaataaggtaaaggctaaggcgatgatttcggccttcgacactaccgccaaagtagatgctgcctttgccgaactgaaagcctactgggaccgcctgctggacatctacgtcgtgaagaccgacgaagaaaaactggaccgcatggtgaacatctggaaccagtatcagtgcatgattaccttcaacatgtcccgttccgcctctttcttcgagagcggcatcggtcgtggaatgggtttccgcgactccaaccaggacctcgtgggcttcgtgcatcagataccggaacgagcccgcgaacgaatcatcgacatagcttctacccaattccccgacggaggatgctaccaccaataccaaccgctgaccaaacgcggcaacaacgacatcggcggcggcttcaacgatgaccccatgtggcttatcttcggtacggtggcatacatcaaggaatcgggagacttcagtatcctggatgagcccgtccccttcgacaacaaagaaggttcggaagtgtctctgttcgagcacctgcgcgtctccttcaaccacgtcatcgagaacctcggcccccacatgttgcccctcatcggccgtgccgactggaacgactgcctgaacctgaactgcttctcctgggatccgaatgaatccttccagaccacggaaaaccagacggaaggcagccaggcagaatcgctgatgattgccggcttgttcgtggtatgcggacgcgactacgtggagctgtgccgccgcctgggtaaagacgacgaagcaaacagagcgcaaacctacatagacaatatggtggaagccgtaaaaaaacacggctgggacggagactggtatctgcgcgcctacgattacttcggccacaaggtaggctccaaagagaacgaagaaggacaaatcttcatcgaatcgcaaggctggtgcaccatggcaggcatcggactggaagaaggcatggtaaaaaaagcgctggactccgtaaaggaacgcctggactgcgagcacggtattgtactcaacaatccacccttcacccgctatgttgtggagtatggagaaatctccacctatcccgccggctacaaggaaaatgcgggtatcttctgccacaacaacccgtgggtcatcatcggagaaaccgtactgggacggggtgaccgttcctgggagtatttccgcaagatatgcccgtcgtacaccgaagagcacagtgccctgcataaagtagaaccttacgtatgctgccagatggtggccggcaaggacgccgcccgccctggtgaaggcaagaacagctggctgactggaacggctgcctggatgtggtatgccatcacgcaattcatactcggcatcaagccttcgtatgaaggtctggaaatcaatccttgtatcccggcaggctggaaaggcttcaacgtgaagcgtaggttccgcggggcagaatatcatattaccgtgaagaatcccgatggtgtgtgcaaaggcatcaagtccgtcacagtagacggccagccgatagaaggcaatgtggtgaaccatctgccgggcacgcatacagtagaagtaataatgggataacccacaaaatacaatatcatgataaaccctatttattctccagcgcccgaacgctatgacaacggcatgaaattccgccgttgcgggcaaagcggcatcctgctgccggaaatatcactcggattgtggcacaacttcggcgacgtgaacacatttgccaattcccaggccatggcgcactatgccttcgaccgtggaatcacgcatttcgacctcgccaacaattacggtccttcctacggttccgccgaagagactttcggaatgattatgaagaaatccttcatgccctatcgggacgaactattcatctccaccaaggccggacacgacatgtggcccggcccctacggggagtggggctcacgcaagtacctgatgagcagcctcaaccaaagtctgaaacggatgaacctggagtatgtggacatcttctactcccaccgctacgacccggatactccgcttgaagagcccctgcaagcactggttgatatcgtacggcaaggcaaagcactctatgtaggaatctccaaatatcccaaagaggcggccgagtttgcctgcaaatacctggaagaacgggatgtacactgcctgctctatcaaggcagatacaatctcttcaaccgcgaaccggaagaagaaggtatcctgcagcaagccaaagggaacggaaccggcttcatcgccttctccccgctggcgcagggcctgctgaccaaccgctacctgaatggtattcccgaagattcgcgcatggcaaagggggctttcctgaagaaagaagcactgaccgacgagacgctgcaaaaaatcaaggcactcaacgaagttgctgcctcacgcgggcaaacccttgccgagatgtcacttgcctggctgttgaaggacgacctggtgacaagtgtcatcatcggagcgagctccgttgcccaactggcagataacttgaaagcgactgaaaatacagacttctctgccgaggaactggagaagataaagaaaatcattcaaaaataaatcaacatgaaaagcctccttattcaaaccttttgtttattattcctttgcttgggcacggtccgtgcacagcaataccaacttgtatcacccaacggaaaactatccgttacggtagatgccggagaagccctcacctggcagattgcacacgacggcaccacagtgctgcaaccctctgtcatcgccctgcaaggcagagatgaaaaatcagccaagaaagcaataactttcggtaaaaatgtaaaagtaatccgtgcagaacgcaagtctgtggagtcctccttccccactcccctctacaaaaaggcaagtgtggaggatgtctacaaccagctgacactgaaatgccgaggaggctacagcgtacagttccgcgcatacgatgacggcgctgcctaccgcttcatttccgaacagaacaagccgtttatcgtcctcaacgaaactgcggacttcaatttcgacaaggattaccaggcatttgtaccttacataaacgacaaccgcaacggtgagcgctattgcttctccttcgagtcttactacgacgaagccccgttgtccaaaatgcacaccgactcactctccatcaccccactgatggtttgcctggacggaggaaagaaagccgttatcatggaagccggattggaaaactatcccggcatgttcctcactgtaaatccccagacacgtcaaggagtgcaggcagcatttgccccctatccgctggaagaaataatcggcggacacaaccggctgaacctgataccgaccaagcgtgcagactacatcgcccgttgtgccaagcaggagctcccctggcgtgtggtgctcgtcaccgaaaaggacacgcagcttgccgacaacgacatggcacagcgtcttgcccccgcctgccgcatcaaagacatttcctggattaaacccggcaaagtggcttgggactggtggaacacctgcaacctgactggagtagacttcaaagccggcatgaacactccgacttataaggcattcatcgactttgccgccgacaacaacctggaatatatcatcatcgatgacggctggagcggaaacgaatccttattgaaagacctgaatccggatatcgatttaaaggaactggtagcctacggaaaccagaagggcgtcggcatcattctctgggcaagctggcgaaattctgccaaagatacggaagccgcattcagccactatgcacagatgggtatcaaaggcttcaagatagacttcttcgaccgtgacgaccagccactggtacagtccgtagaacgcattgtagcctgcgccgccgagcaccgcctggtattagacctgcatggactcaagccatacggtatacagcgcacctatcccaacgtcctaaactttgaaggtgtaaagggactggagaacgccaaatgggaaccgatagtgaacggagcccccctccacaacttcccgcgctatgacgtgactgctccctacctgcgcatgcttataggtccgatggactacacaccgggagccatgatgaacgcaacccgcgaaaccttccgtgccgtcaacgaccatccgatgagccagggtacacgcgtccaccagatggcgatgtacaccctcttcgaagccccgctgcaaatgcttgccgacagccccagcaaatatatgaaggagcaggaatgcacggacttcattgccaaagtgcctaccgttttcgacgagaccgtggcactggacggtgaagtaggtgaataccttacactggcacgccgcaagggagacgtctggtacgtcgcctccatgaccgactggacaccacgcgactgtaccatcgacctttccttcctcggagaaggaagttacgaagccgaaatcttttccgacggcatcaatgccgaccgggaagcaaccgactacaagaaagaagtacgcaccgtgacctcgggggacaagctgaacatacacatggcacccggaggaggatggacagcacggatatggaaaagatgacagggggataaagtaatgacatgataagtgcaatagggtgacagttacgttaaaagtgctgtcaccctattcctttatcacttttaacatacctctacgtgaaccttttatatcctatcttgttttttctcacaaaagcctaaggtaccatagggcaggaatttatattaaacctaaacaattataaaagtatgaagaaatttattcccctattattagcggtctttgcagtgacgcttgcatcttgcgaaaaagaccctgacatggataagctggacaataattatctggtttataccaactatgacaagaaggcggatttcaaaaccttcgaaacttattacttgccggacagcattctggtcatcggtgataaggaaaacgccgaatactggaaagatgagaatgcccaggaaattctcaacgcttatgtcactaacatgaatagccgcggctacatccgtgtggatgaccgggaagaagccgaccttggcttgcaggtaagctatgtcagaagtacctattacttcaccgactacggacgtcccgaatggtggtggaactatccaggctactgggatgctccttactggggcaactggggcggatggtattatccctatgccgtgaactattcctacagcaccggttcctttatcagcgaattgttgaatctggaggcgccgcaaggccagagcgagaaacttcctgttctgtggaccagctatatgagcggcttgctgagtggttctacttctgtcaataccaaacttgccgtgcaaggtgtgaaccaagctttcactcaatcaacttacctgactaacaagtagtgacaagctacgagctataagtgacaaatgacgggttacccaatattaaggtaacaagaataatacggcagcatcctttccggactgggaagttgccattgaaccaaaaaacaagaacaaagtatgaaaacaataaaatatctttccttgagagtatttgcggttaccgctcttgctctcgtcttcgccctaccgacgaaggcacagatgaccgataacggttatgccaatatcgactggcaatataactttcctctcagcaacaacttcgccgacaaatcaagcggctggggtatgaattttgaaggcggttacttcctgacagacaattttgcattgggagctttcttgaactaccatagcaaccatgagtatttcggtcggcagacacttcccgtaggcgaaggcggcagtctgaataccgaccagcagcacactgcattccagttgcctttcgggctggcctcccgctatgtatggaaccgtggaggtgcattccagccgtatgccggtgtaaaactgggtgctgaatatgcacagttgaagtcaactttcaacgtattcgaagccaacaaagatacatggggtttctatgtatctcctgaaattggtttcaatgtgtatccttgggcttatggaccgggcttgcatttcgcagcctattacagctacggtacgaacaaaggtgacctctttacgtacagcgtagacggtttgagcaatttcggtctgcgcgtaggtattgcgttctgataagacacacacttaaagcttaacagatagaatttaattgtttcaaaattgaagaagaaaagagcctttcctgcgtgagcaagggaggctctttttaatttgtaccaattatttttttcctctcagcatcgccttatataccgcctcctgaatcctcatccttatatccagcctcatcaacttgttattccacacatccggataggtgcggttgctcaaaaagacataaaccaagccgttctccgggtctgtccaggcgcaagtacccgtgaaaccggtatgaccgtagacagaagcaggggcagactctgcgcagggactcttctggggattacgccggtcgggcttatcaaatcccagcccccggcggcttatccttgagacggtggtagtaaataccctgcaagtctccttgctcaaatagcgcttaccgtccagttcacccccattcagcaacatctgatagacttttgccacttctccggcagtggagaacagcccggcattaccggaaacgccgccctgaaaagctgcagattcatcatgtacaaatccttgcaaggtagtcttacgcaagaaaggatctgttgatgaaggtacaatatcttccttcttcaagaagcgcagaggaagataccccgtacgctccaatcccatcggagtatagaattccttggccagatattcgtccatagacatgccggtgcgcgcctcgaccaactgctgcaacaagataaagcccacacaactataacggtaacgtttatctctaagcgaagtatccacaatcttctgcaagtactcttgcttgaaggaacggttcagccaaaggctgtcggacacttgcatcgtatattccggtgtctgcaccttcgacgtcagtccctgacggaagcggaacttagggttcgcccaagtctgtcgtccgatgcgtgcggaatgccaggcatcgggacgtgccttgaacaaagtgccggtgtagctttcttcatcaatcgcttcctgatagaatagcaaggtagaaggcagaccggattcatgcatcagcagttcgcgtaccgtaatattcttcttgtccgtatcctgtaggaaaggcagataatctgacacctggtctgtaagattgaggcgtccgccatcgtacaacttcatcacagcaagcagcgtggctgtggtctttgtcagcgaagcgatgtcgtatacatccgtcttctttacgggaagcgccttgcttccggcctcgttccagacgtgggtaccgaaagctttattatacatctccctaccatccttcagcaccaccacctggcagccggggtaagccccttcacgaatgccttcttcagctatcttgtctatttcagccagcagacgggaattcataccatgctcttcgggtacaaagcggggggcgctttgaggagtcagcgtcactcccgcaccggcagcaaaccgactaccgatactggcagacaagcgtccctctgaacaagcgctgccataaacaatccgggcaacctgccgctgtacctcctcgttggaggagtgtgccaaaatcaccgcttcagcagcagcgtccccttgttttatctgcaatacctgcttgccaggaataaagaacagataaaccaccggtacgtcaggagcgaactttgcaaagaaattctgatagggcgtcaaacggtgttcggtgacacagaccagaatacgtttgtacttggccagcgcattcctcaaacggttcccgtcagcctccggcagattcttgcccaaatggaactccacaggacgggtatactgcgacagttccttgaggaacggctggatttcctgcgcttctcccacattgagcacggcaacttcaccgatggaagggtccagcggaagtacctcgtcccggttatccagcacagtgatggccgccaagttcagccggcgcatcaaatcacgcgttttcggagtattgatgcgggtccccaaacctgaaagctgtacatggggtttcttttccaacccaagggcatatttatatttcagtactttacggcatttcgcctctatctctttctctgtcagctccccttttttcacagcggcaagcacagcctccacttcttccttaatacgccgggggacaagcagcaaatcattgccggctttcagcgcctgcaaacagatgctttcattgcccgatacccctttcatggcaagggcatctgtaaagacaagcccctgaaagccgaggtcattcaccaacagaccggaaactaccttacgcgaaagcgaagacgggagccccttttgcggctctatggtaggcacctccaagtgccccaccatcattcctcccaatccggcacgaatggcttttctgaaaggataaagctctatactgtccagacgggcacgggtaaaaggcagcacgggcaacgccttatgagaatccacatccgtatccccatgccccggaaagtgcttgctgacagaaagtacaccaccatcctccaaccctttggagtaggcaacaaccttgttcgccacattgaacggactttcaccgaaggaacgggtattgataaccggattcttgggattgatattcacatccgctacaggagcaaaattcacttgcacccccagttcacggcattggcgggccacttcgcgcccatattcataaatcagtgtatcgttctgtatgcagcccagcaccatgtttcgcggaaagttcggagtaccgcggaggcgcatagccagtccccattcaccgtcaaaggtaatcatcagcggaacttccgccatccgctgcgcctcattggtcaacatcacctggttctgcatcaatccgccggagaataacagaccgcctaccttatagtcctccaccaccttacgcagcagttccttgttggccttgtcctgctggggggcaatcgtatagatgaacagttgtccgatgcgttctttcagagtcagacgctgcatgacggaatccacccactgcctgcaccgcacgtcactgttcaagagacgtacaagcgaagggtcgttcggcggcaccggagtaaacggcatcgggccaagctgcgctttcagaagcggacaaagacaacacaatatagtgatataggcaagcaggtatattctcttcattccttatagatagattgtttttaggggatttgcggaataatacttttataaatcaattcctggatatctcttcttatattcatgtcacccagtttcgtgttccatacattggggcacaagcggttgctgaggaatacatacactgtcttgttttccgggtccacccaagcacaagtaccggtaaatccggtatgtccatatactgcttccggagcggaaggagcacaagggctgcgcttcacaatggatacatccggcttgtcgaatcccagaccgcgacggctgatggcagatttctccgtcgtaaacaaacggcaggttgcctcactcaagaaacgcttgccattgaattcaccgccgttcagcaacatttgataaacctttgccacctcttcggccgtagagaaaagtcctgcattaccggacaccccacccatgcaggcagcagtctcgtcatgcacatatccgcatatatcctggcgacgcaggaagtcattggatgccgtgggcatgatttccgctttggtgaacttcgtcaaaggcagaaacatagtacgttgcaatcccatcggggcatagaactcacgggcaaggtacaaatccatcggcagctccgtcaccttctccactacctgctgcaacagcacgaagccgaggtcgctgtaaacataacgtttgccatccaactcgcacttggctatccgctgaaggatagaattcttgaaactcttgttcagccacatgccatctgccatgtgcagggtatagaccggtgtattcttgtcggacaccatccctttccggaacttaaaatcggaacaataatagctatgctcgcttacctgcgtacgatgccactcgtccacccaactctgggagtacggaccgtgtaccgaattcgggtctatgatgtccaggtagaagcggatatagggaggaagccccgattcgtggaacaaaagttcgcggatggtaatgttccgcttgttgccattgcgcaagaagggcagataagcggaaaccttgtcatccagttttatcttgccctcatcatacagtttcatgacggcaagcaacgtagccgtagtcttggtcagcgaagccaaatcaaaaaggtccgaagaacggacagtagtggtatccttatcagagtgggttccgaagcctttgtcatataccggcagtccgtctttccacaccagcacgcggcaaccgggataagctcccgcttccagtcccttccgggcaacggcatcgatactttgcagcacatacgatttcatgccgtaatcttccggaacagtcttccccggtttcatgcccggttcaatcatacagcccgttcccgctggaaacagtttaccgatactcatcgacattctgccactggccggctttttggcaaaaagaacatcaaccacgtattgctgcaaatccgtctctgccgaatgtgccagcaccacagcgctagatttggcaagtgcgggcatcagaggttgcaatgtacggtaagaggtaaaaaaagtatagaccagcggagcacgcaggttcaagccttccagaaaggccacatcacggtcgctgacataagccgaaccggtgatgctgataaccacgcgacggaaagcagccaactgcccctgcacttcctgccagagagcctcatcggcattccaaggcaagtggaaatggctgatgcctgcattctttttcatagcttccacaaagggagcatctgcctccttctctccgatgctgagcacggcaatatcaccttccaccggtgccagcgggaggacatcgaaataattgttcaatacagtcactgccgaacggcgcaacttggcagccaacgcctgcgcttcctccgtattgatgcgatagctcattccgctgacccgaagttgcggctggcggtttctcaagccaagcatatacttgtacatcaataccttgcggcacttggcatcaagttcgtccttactcagttgtcccgactccactgcatctaccagctcctgcaccgcattcttcgtattgaactgtaccagcaccatatcatttcccgccagcagcgctttggtagttacctgcggaatggcagacacacccttcatgtccaaggcatcggtaaacaccagccctttaaagccgagttcatccttcaacagcccggtcaccacattccgcgacaaggaagaaggagtcaccccgtccgggtccagcgcctgcacttgcagatggcctaccatgacaccccccaatccggcacgtaccatttccttgaagggataaagttccacactgtccaggcgtgcacggtcgtagtgcaaggcgggaagcgccttatgagaatccacatccgtatcgccatgcccggggaaatgcttgcaaacggaaagtatgcccccgctttcgagcccacggctgtatgccaccaccttttccgccacccgctgcgggttctcgccaaaggagcgtacgtgtatcaccgggttcagcggattcgtattgacatccgcatcgggtgcaaaattgacgtgtacccccaattcgcggaactggcgggccacctcacgtccatattcttcaatcaggccattgtcctcgatacatcccaaggcggcattacggggatagtccggagcgcctttcagcctcattgacagtccccactctccatcgaaagtaaccataacgggaatcttggcatccttccgggccatattggtcaagatagcctgctcttccggagtaccttcggaaaacagcaagccaccgaccttgtatttctttaccagctcgcgcatctgctttttcgtggccttgtctgctctggccggaatggtggcaacgatgagctgccccactttttcgtgtacattcagacctgacaacacggagtccacccattgccggcaccggttgtctgcagccgaaggaagaaacgggcctcccgtctgggcgtgaagtgaagataatcccaatataaacaatcctgcaacccataaaaggagggtgagtcttttcatcatgctatttttcagttaaagtaagtaccatttctcctacgtagatgccactctttccggtgtgcagcacgggaacgctcttgccgtccgcattcagataaacggcaggcttttccataaaagtatgcgaatgtcctcccaaaatgacatcaatgccacgcgtcttgcctaccaggttctcgtcggaagcgccttcgggatttgcactgcggatacccaaatgagacatgcaaatcacaacctcgcaattctccttctccctgagaaggtctgtcatttcttgggccacctttatcgggtcgttgtagacaatgcctatgcatttatccgcctgcaccagcccttccatcttgggggccaggccgaagattccgattttcaccccttcgcgcaccaaggtgatataaggcttcaccagcccttcgagtaccgtacccgtcacgtcataattggaacagaccacgggaaaatccgccatacggaacaattccgccatattctcaagtccgaaatcaaattcatgattacctatcgtcatggcatcatagcccatgaggttcatcatcttgacctccagctcgcctttgaaaaagttataataaggggtaccttgcgagatgtctccgcaatccagcagcaacatatccggatgcttgccgcgaaactgctttacaaaaccggcacggcgcaccacaccgcccatcccggcatactcgtcggcagcctcggcgctgatgggttctatacggctgtgcgtatcgctggtgtgcaggataaacagttgttttccggattggccggacgatacagaatcggcggacaccaggcaaaggggttcttcagtaatgacacgcccctcttgctgtgccgatgcggggagcatgaaaagcagcagggctgccaaggaatacatatgtttcatagaacttctgtttttttaatgcttactctttaacgaccactcttccctccatgcgcgaagtcaccttcttgccggctgccgtctgcttctccacatacttcatgaacagaccacgcagtgtagccccatccgggcactcccttttatccgcctgcaggaaagccgtcattccatcgtttccatcagccagataatcaatcgtggcaaccgtatagtcacggtcatcctccaccggcttgccggcaatggaagcctggagcagcttgccatccttgctgatttccaactgtataccactcaccccttcaccaagtctcaccgcaatgttttcaaacaagtgcttcatggcagagcctttcatcgtcagcacacagagcgaattctcaaaaggcaatatctcatagatgttttcggtagtgatatctccttccgtcagggaattccggattccaccgatattgattagccccatatctgccggtttgcccagcacttccaccgcagcctcacgcagtacatctgcaatcagattggataaaaggctttcgggccggaatctgtccatcgacatttctgcggttcccaccacatgatacataacgctgtccatccgggccttgtaaggcgccagcagagccacggcttcggcatccggctcggcatcccagacagagttcatgggaattctgcctccctctaccttggtcacttcgtaggaagaatggcaggaaaccaatagaagtgcaaccgccaacactgcccccgcaaggagactgaaagtttgtttcttcatattcatttagttttaaattgctacaaatatacttttcttttgcgactgagccacacaattaaccgattatttagacttgcgtttagcagaatgaaacgctcaaaaatcatcccaactggcgaaaaaaagcttgaagcacttgtgtatctggcaaataattcgttcctttgcaccgctttcgcgcaatcgctgtcaggacaccaagagagaagcctggtatgttgcgttgtaacgatgaaacaatttaataataaaaacaatggatttaattaaaattgcagaagaagcatttgctaccggaaaacagcacccgagcttcaaggcaggtgacactgtaacagtagcatatcgtattgtcgagggtaacaaggaacgtgtacagctgtaccgtggtgttgttatcaagattgccggacatggagacaagaagcgttttacagtacgtaagatgtcaggaaccataggcgtagaacgtattttcccgattgaatcaccggctatcgacagcatcgaagtgaacaaggtgggtaaagttcgtcgcgctaaactgtactacctgcgcgctcttaccggtaagaaagcaagaatcaaagaaaaaagagttaacggttaattccagactcctatttcgaaataaaaaagggaaactgacaatgtcagtttcccttttttagtgatatacacagtaggcatacacaccatgcgatactctactgctactccctcattcaaaacattgtaagcctgcgctcctttcctttcacataagccttccttcttgctgatatgttagtttatcagcgcccaacggccgtgagacgctctgctaacgaccgtcaacaaggtgctttatggccgttagacgagcgcctcacggccgttaaacagctgtcataggcatagcttttccatactgaatacctatcttatccataccgaatgcctggcttccacctattatcgcacgggcttttacaaagttaataccgtgtttgcaggaaaccaatagcttgtttacacgatattggcaaattgctccatatcctattaatttattgtactacaatatattaatagattatttggtgtaaatttaaggtggaagcaacttttgcttccaccttttcaagttgcttccacagcatccgcaaccccgatgaataaagggatacagagaatgggtggaagtgtggaagcaacttgtgacataactttattgctgaggaatatgtgccactaaagaaaaaaggtgtgtcgaaactctcctaaactaaaaatcaccctcgccacaggtagttgtagcgagggtgatttcgagaaaaggggagttttgacacatccccctcctttatcagtttccctgatatcgattacttggtatctctcagctcccagcccaatgcactggcacccagcacagcggcatcagagtccttcaactcggaagccagcaacttagtcttgcctttgtagatattcaatacattgtcatcaatggctttctggataggcttgaagatatagtcgcccgcttttgccagaccaccgaacagtacgatagcttccgggctggagaaagcaatgaaatcggccaaagcctcacccaagatagttccggtaaactcaaaaatgtcttgagcaatcttgtcgcccttcacagctgcatcatacacatccttggaagtaatgttttctgctggaatgtcgcgcaacaagcttggctcggtactcttggtcaggaactcacgggcagaacgtgccacacccgtagccgagcagtaagtttccagacaaccgtgacgtccgcatccgcagagacgaccgttttcacgacggataatagtatgtcccaactctccggcaaaaccgtcatggccatataccatctgaccgttaataacgataccgctacctacaccggtgcccagcgtaatcatgataaagtctttcataccgcgagccgcaccgtaagtcatttcaccgataccggcagcattggcgtcgtttgtcaaagcggtaggaatacccaaacgctcctcaaacatggcagccaaaggaattacgcccttccaaggaagattcggagcaaactcaatggtaccgctgtaatagtttccgttaggagcgccgataccgataccttttatcttgtctacaccgccattggcaataatgagcggcaacagattcttgcaaacttcgtctacataatcattgacgtcttcataagctccggttttgatggaactgcttgcaataatagttccgcgtgcgtctacaataccaaagacggtgttcgttccgcctatgtcaatgcccactacatagggcttttccatgtttgaattcatgatactacgtttgtttaaagggttagttaatcatattcatggttacaaaaatcacaaagaaaaacgacactgcaaaatctttttttaaaaaagtttgcaacttttgcaacttttcgtagcatagctgcgtctaatagtgaaaattaataagagtaaagcaaaaaaacagggaaaacagtgatacaactaaaagacattaacaagacctattacaacggagcaccactgcacgtgctcaaaggcatcaacctcgacattcagaagggtgaatttgtttccatcatgggctcatcgggttcgggaaagtccactttactcaatatactgggcattctggataattatgacaccggagaatactatctgaacggtactcttatcaaaaatctcagcgagacgaaggctgccgagtaccgcaaccgcatgattggcttcatcttccagtccttcaatctgatttcattcaagaacgcagtagaaaatgtggcacttcccctcttttatcaaggagtgagccgacggaaacgcaatgcgatggcattggagtacctcgaccgcctgggcttaaaagactgggcacaccacatgcccaacgaaatgtccggcggacagaaacagcgtgtagccatcgcccgcgccctcatcacccagccgcagattatccttgccgacgaacctaccggcgcgctcgacagcaagacttccgtagaggtgatgcagattctgaaggaactgcacgatacgggcatgaccatcgtagtcgtgacccacgaaagcggcgttgccaaccagacggacaagattatccacatcaaagacggcgtcataggcagcatcgaaacaaacttgaatcacgatgcaagcccgttcggaaaagacgggttcatgaaataatgaaggaagagccctctttcccttctttaatttttaattcttaatctttaattatcaatgatagacctttggcaagaaatatacggaaccatcaaacgtaacaagctgcgtacgttcctgacgggctttgccgtagcatggggcatcttcatgctcatcgtattgctcggagccgggaacggcatcatacatgctttcgaacagaatgcgtcggaacgtgccttgaactccatccgcatttttcccggctggactaccaaatcatacgacggtctgaaggaaggacgtttcatccaactggacaatcgggacatggacgacacggaaaagcaatttacagaaaatgtcattagtgccggtgccacagtacgccagagcaatgtaaacgtcagttttggacaagaatatatcaatatctccctgctgggcgtataccctaactacacagaagtggaaaccgtgaagacggcagacggacgtttcatcaaccacagcgatctgaaagaccggcgtaaagtaatcatcctccataagaaatccgcagatatcctcttcggcaaaacacataccgaacctatcggacaatttgtcaatgcaggtggagtggcctatcaggtagtggggctctacaatgaccagggagaccgcgaggcaaacgaggcctacattcctttctccaccttacagaccatctacaataaaggagacaagttgaataacatcatcttcacgaccaagaacctgagcagtatagaaagcaatgaggcctttgaaaaagaataccgtaaagccattgccaccaaccatcgcttcgaccctaccgacgacagcgccatttggatatggaaccgtttcaccaactatctgcaagcccaaaacgcaatgggtattctacgcaccgccatctgggttatcggtatctttaccttgttgagcggtattgtcggtgtatcgaatatcatgctgattaccgttaaagaacgtacccgtgaattcggtatccgcaaggcactgggagcaaagcccttctccatcctttggctgattattgtggaaagcgtgactatcactacgctattcggttatatcggtatggtggcaggcatcggggtgacggaatggatgaactctgctttcggtaaccagacgatggatgccggcatgttccagcagaccatgttctccgatcccaccgtagacctcagcattgccgtccaagccacactgaccctcatcatagcaggtacacttgccggattcttcccggcaaagaaagccgtgagtatcagtcctatcgaagcacttagagcagattaaagattatgaaaatagacatagatacatgtgaggaaatcctcatcacaataacaagaaacaagacaagaagcctgctgactgcattcggtgtattctggggcatctttatgctggtagcactcatcggtggcggacaaggcatgcaggaagaactgaaatcccagttcgaaggatttgcgaccaactcgggctttatcgccgcacaaaagacaagcgaagcctacaagggattccgcaagggacgctggtgggacttggaaatggaagatgtggaccgtgtgcgcagtgtggacggcatcgcactcgccacgccttcatttgccctttggggacagaccgctgtctatggagaaaacaaatatgaatgtagtgtaaaggggctgtacccggagtatgagcagatagaacatcaggaaatgacttacggccgttttatcaacaacgtcgacatcaaagagtcacgtaaagtgtgtgttatcggcaaacgtgtatacgaaagtctctttaaaccgggagaagacccctgcggcaaatacgttcgggtgaacggaatctattaccggattatcggaatgtgttcatccgaaggcaatgtcaacatacaaggacaagcctccgaagccattgtattgcctttctccaccatgcagcagacctacaacctcggaaagaaactggatgtggtatgtttcatcatgaaaccgggaataaaagtaaaagacgtacagcccgaagtggaacgcctcgtaaaagcagcgcattacattgctcccgatgacaaacaagccgtcatgttcctgaatgcggaagctatgttctctatgatggacaacctgatgaccggagtacactttcttatttggatggtaggtctgggtacattgttcgccggagccatcggcgtatcgaatatcatgatggtaaccgtcaaggagcgtactacggaaataggcatacggcgtgccatcggtgcccgtcctaaagacatcctgcaacaaattctttcggaaagcatggtactgaccactatagcgggtatggcaggcatttcttttgccgtatttgtactgcaaatacttgaaaaggctgccaacgaccctggagttatcaaaacccactaccaggtttcattcggactggctatcggaacttgcatcctcctcatcgcattgggagtgcttgccggactggcacctgcctatcgcgccatggcaatcaaaccaattgaagcaatcagggatgaataaacctataaaagattatcaaccgtaaaccatgaaacaatggttactatatcaatagtaaataattaaatcataaatataagatgagaactaaaaagtatctgaaaattgcattattggtagtaatagctgccttgtttatctggacatttatattcctatatcagaagtcccaacctaaagtaaaggtatacgaaacagtagttccggaagtgacagacctcgaaaagaccaccgtagccaccggcaaagtggaaccaagagacgaagtactcattaaaccgcagatttccggtatcatatctgaagtgtacaaggaggccggacaaagcataaaacaaggcgaagtgattgccaaagtgaaggttattccagaactaggcacattaaactcagccgaaagccgcgtacggttggcggaaatcaacgctgcccaagccgaaacagacttcgcacgtacccagaagttgtacaacgacaagcttatcagcgctgaagagtatgaaaaaggagaggtaagtgtaaagcaagcacgcgaggaactgcagactgcaaaagacaacttggaaattgtaaaggaaggcatcaccaagaacagcgcctctttcagtagtacgctgattcgttccaccattaccggtctgattctggatgtgcccatcaaagtcggtaactcggttatcatgagtaacaccttcaatgacggaaccactatcgctaccgttgctaacatgaacgatttgattttccgcggcaacattgacgaaacggaagtgggccgtgtacacgaaggtatgccggtgaaactgacaatcggcgccctgcagaatctttcgttcgatgccacactggaatacatatctccgaagggtgtggaagaaaacggtgccaaccagtttgaaatcaaagctgccattgccgcaccggacagcgtacagatacgttccggctattctgccaacgcagaaatcgtattggaccgtgcccagaaaacgcttgccgttccggaaagtactgttgaattcaatggggacagtacctttgtatatgtaatgacggacagcgtaccggtacaaaagttcgaacgccgccccatccaggtcggcatgagcgacggcataaagattgccatcaaaagcggcatcagtgcccaggataagcttcgcggtgcagagaaaaaggattaacaaacggaatagcttaaaaagatatacgacatgaataaaaagatattcttatacctcgccatattcggcagtatctcagtgcaggcgcaggaacgctggtctttgcgccaatgcatagactatgccatcgagcataacatcagtatccgccaaacagccaacgctgccgaacagagtgctgtcgaggtaaatacagccaaatgggcacgactgccgaacctgaatgccagtgccggccagagctggaactggggacgtacgcaaacagccatcaagaacgaggatacgggagactactccactgtatacgtcaacaccagcagtcacggaaccaacatgtccgtcaataccagcatacctatttttaccggtctggaaattccccaccagtatgcattggccaaactgaacctcaaagctgccattgccgacctggacaaagccaaggaagatattgccatcaatatagcttcggcctacctgcaagtgctgttcaatgaagagctccaccaggtggcgctgggacaagtacaactgagtaaagagcaatatgtccgtatcagccggctggcagaactgggcaaggcttctccggcagaactggcagaagccaaagcacgtgtggcacaagacgagatgaatgtggtacagacgaacaataattataagttggctctgctcgacctcagccagcttatcgagctggaaacacctgaagggttcaatctggaatctccggcagtcaatctgaagttggttcctctcactcctccggatgaaatattccaaacagctatggtaagcaaagcctccatccaggctgcacagttccgtctggaaggcagcaagcacagcatccgcatcgcccagagcaactactacccacaactgagcctgaacggtagcctcggtacgaattactattctaccattgaccgcaccttcagccagcagatgaacgataacttcaacaaatatgtaggcttcaacctcagcgtacctattttcaaccgcctctctacccgtaaccgggtgcgcacggcacgcctgcaacgtgaaaactatgccttgcaactggatgatgccaaaaagacgctttacaaggaaatccagcaagcatggtacaacgccgccgctgccgaaagcaaatataccagcagccatacagccaccgttgccagcgaagaatctttcaagctgatgagcgagaaatatgaaaatggtaaagcaaatgccgtggaatacaatgaagcaaaacaaaaccttatgaaatcccaatcagacgaactgcaggccaagtatgactatctgttccgtaccaagattctggatttctataaaggagaaccgattgagtaaaaaacgaagtataattttagttgttgtgtttgattctcccctctccctgcttcatgcaggcgagaggggagttttttgttcttctatctccttgtattttccgaagaacgggaagagctactgcgggtagtgcttgaagagctgctgcgacggctttcggaattccgtacgccggaagcatttcttctttccttactttccgtctttaccctgctacggctggggctcttatcattatttttagttcttgtggtttctattttctctttactcgactttctgccactatccacactactacgtcgcgtactgctgttacgtgtacctgtactaatgcgattattactaccgttgctacgtcgcgtggtatatacatcatccctgcctgccggacgcttatgcgaattagggcggatgttcaccgaaccgaaatctgaacggcggctggtgtggtacgacttatcattccgaatgctccacgaaccggtatagtgcggatgatggtaacgaccgcgataatagctgttgtgatagtgcgtacgacaatgcccaccgcaatatgtacggtaatgatacggccgcgggaaatagaaatgattatggttggtgtaagtgatgtaaaccctaaaagaccaacgcccaccacttacataaaccggacggtaaaaataggcggcctgcatgaaacggccatactgccggttattcagcacccatcgaagatcgtcattgcgcacatccagataatcgtaatagcgattcaaggcccattcctccccccgaagaacgtcatccatcagatagcgtataccggaaatgaaatcatagtttatttcgtacacgtcattatactgttctgtattcaggttcaattcataggccatcttgtccgtaagaaagcgggtctctttacgcactttgctgttgctcattgccgcactgcaaacagctgtgctcatcatagcggcaagaaatataatccgtttcataatccctccttttttagttattcttctcatgatattgtttgatgaaggcatttatctcgttcttgtccgacgagaaggtcagcttgtctatcgcataatagaaattcggtttatcgactattttaggataaatcttcttcatcaactgcttcttttcactgtcgaaacgataaaaatccatcagacggatacactggtcagtagtgaaccaagaggtcagcaaggcatggtcgagcacttccttacggtctgaatcgaaactctgtttttccatcagccccataaactgttcgaaggcagagggagacattacccgttcatactgcccgccccctgacggtctgtcaccgggtctgccaggcttgtgatgattagaagtaccccagtttccaccaggtcttttgtcctctggaatgaaaatatcttccacttcattgatggagcaatgcacacgttcatcatataggagttttcctcttcgaggattccccccacgggatggcgcttcataaacctccacccgacaactaccacgcagattggctacaaaacaactgaaagtaggcaggcaaacctgctgtccgtcgaccaataccaccactctacggtatggactttctatacggattccgtctatgggcgccgcttttattgcgggaaacgctaccagaactagacaaacacttaatatcaaatgacgtatcatgacttttcttttttattgtacgacaaaaatagggagaggaaattcccctccctaatgattgtctctatttacaagtagggaaattcctaatgactgggactaattcctaatcctgattccatcttcctccaatacaaccagatgttttttgtacaaatctcccacagcctttttgaaggttttcttgctgacaccgaaagttgcatagatttcttctgccggactcttgtcattcaaagctatccgtccgccctgttcacggatatagtccagcagcgtagctgagaaatcttctactttagcctgccccgttttttgaagcagcaggtctatcttgccgtcttcacgtacctgcttcacataggctttcatcctcatgcccgtgtgcagtggctgaaatatctcgctctcatatagcaagccgctatattcatcgttgatgatcgccttgaatcccaaatccgtcttctgccaaatcaggatatccacctcctgccccgactcataggcggccttctctttggaaagataacggtctaccttggccgatgccacgatacgatagctttcatcatccaaatgggcatgaaccacatacttctttcccacctgcatcttcattttctgttcgcggaaggggacgaaaagatccttcatcaatccccagttaaggaaagcgccatactggtttatccacgccacctccaagcaggcaaactgcccgacctgcactaatggtgtcagagtagtggctaccaggcgttcttcgttatcaagatatataaaaacgttcagtttggctcccaccttacagtcttgggggacataacgcgacggaagcagaatttcaccttcttcgccaccgtccagatacatgccgaaggctacctccttcaccacttccagcgtattgtactttcctaacttaatgctcatagtttcttacttatcttcattttcccaacaaagataagtaatttaggtacaatacagcagttcggaaagaagaaataactttttgctctaaaagataacttttttctatgaacaactctcttcaaaaagggttatctttgtatcgtgacaatcagcaagaaaagatattactcacctttaaataaaaaagattatggaatttctgacaaatgacaaattgacaatcgtcggcgcagccggcatgatcggttcaaacatggcacagactgcaatcatgatgcatctcactcccaacctatgtctgtacgacccttatgctcccggactggaaggtgtggccgaagagctgttccactgcggattcgaaggaatgaacatcacatttacctccgatatcaaagaagcgctgaccggtgccaagtatgtggtatcatcaggcggtgccgcccgcaaggccggcatgacccgcgaagaccttttgaaaggcaatgccgctattgccgaagaattcggtaagaatgtaaaagcctactgtccggatgtgaagcacgtggttgtcattttcaaccctgccgacatcaccggtctgattaccctattgtattccggcctgaaaccttcacaagtgaccacactggctgccctcgacagcacccgcctgcgcagtgaactttccaagcacttcggcattgcccccgacaaaatcgaaaattgccgtacctacggcggtcatggtgaacagatggctgtatatgcctctaccgccaaggtggacggtaaaccgttacttgatatcatcggtacccctgccctgactaaagagcagtgggtcgaaatccagactaaggtaaccaaaggcggtgccaacatcatcgccctccgtggacgttcttccttccagagtccggcatacgtctctatcgaaatgatagctgcagcgatgggtggcaaaccgttccgctggcctgccggtacatatgtacacagccacggcttcgaccacatcatgatggcaatggaaactgaaattaccaaagacggtgtacactacaaggaactgaacggcacacccgaagaagaagccaaactgaaagaaagctatgcccacctctgcaaacttcgtgacgaagtgatagaaatgggagtactgcctgccatcaaagactggcacagcatcaatccgaatatcgactgatgtcttcgatagcaaatgatttttagaagtaaggtgcctcgctccatagagcaagaggcaccttttttagatatttttcctcaaaaagccttgcggtataaaaaaaactctttatctttgcacccgcaaacgaaaaaggtgccatagctcagttggtagagcaaaggactgaaaatccttgtgtccccggttcgattcctggtggcaccacttttcaaaagcaatcggaatgtagcgcagttggtagcgcactacgttcgggacgtaggggtcgggcgttcgagtcgcctcattccgacagaaaaggcttaacttttagaagttaagccttttttatttcatccctcctctcctccggtttcccgaccataagagaggggggggcaacgtaacaatctgggaccaacgtaaaaacctgagggattctatttctatgcatataatttttgtacagtttttgattgaaagggtgtcagatttgacaattgcatatctattctatattatatcaacatttaccaaagacatacggaaacaatctccaataacgtaaaagaacaaacaagactccaacaaagagaacaaaaacaacatatacagtacgcccgatgtataaaaagaataaaaaagctctcatttttgcatattctttccgaaataatccctaattttgcactactcttagaataattatacagaaaatgaagaaaaaagccaatcggttagacgccatcaagatgattatctcaagcaaagacgtcagttctcaggaagaactgttgcaagctttgagcaaggaaggctttgaactgacacaagccaccttgtcacgcgacttgaaacagctgaaagtagcgaaagcagcgaacatgaacggtaaatacgtatatgtgctgcccaacaacatcatgtataaacgttcgaacgaccagagtgcaagtgaaatgctgatgacaagcggattcgtttcacttcaattttcgggcaatattgccgtcatccgtacccggcccggatatgccagcagcatggcctacgacatcgacaaccgagagtgtcccgccattctgggtaccattgccggagatgacaccatcatgctggtggtgcacgaagcagcgtcacatgacgaggtacgcagcttcctatcgcaaatcatcccgaacattaaatgatagataacaacaaaaaacaagaaattaaataagaaatggattcgaaacaaattgatgtgatggtggctgacgcctcacatgaagtttacgtagacaagattttggataccatccgggaagctgccaaggtacgcggaacgggcatcgcagaacgcacacacgaatacgtagctactaaaatgaaagaaggaaaggccatcatagccttgtgtggagatgattttgccggtttcacctacatagagagctggggtaacaagcaatatgtagcaacctccggtttgatagtacaccccaaatatcggggactggggctggcaaaacgtatcaagaccgcttctttccgcctggcacgcctacgctggcctaatgctaaagttttcagtctcaccagcggagctgctgtcatgaaaatgaataccgagctgggatatgtgcccgtcaccttcaacgaactgaccgatgacgaatcgttctggaaaggttgcgaaggctgtataaaccatgatatattggtagctaagaaccgtaaattctgcatttgcacagcaatgctttacgacccgaagctgcacgaagaggataaaatataaaaatactaaggatatggaaaagaagaagaaagtagtagtcgcattcagcggaggtttggatacctcgtttacggtgatgtatcttaccaaagaaaaagggtacgaagtatatgcagcttgtgccaatacgggcggtttcagtgctgaacagttgaagacaaacgaagaaaatgcctacaagctgggcgccaaagaatacgtcaccctcgacgtgacgcaggaatactatgagaaaagcttgaaatacatggtattcggcaatgttttgcgtaacggtacctatcctatttctgtaagttccgaacgtatcttccaagcattggccattgcacgttatgccaacgaaatcggcgcggatgccatcgcccacggttctacgggtgcgggtaacgaccagattcgttttgacatgactttcctcgtcatggctccgggcgtggaaatcatcacgctgacacgcgacatggcactgagccgtcaggaagagattgattatctgaacaaacacggctttgccgccgacttcaccaaactgaaatattcctataacgtaggtttgtggggcacttccatttgcggtggcgagattctggattccgcgcaagggttgcccgaaagcgcctatctgaagcactgcaccaaagagggcagcgagcagttgcgcctcacttttgaaaaaggtgagctgaaagccgtgaacgacgagacattcgacgcccccatcaaagccatccagaaggtagaagagattggtgcggcatacggtatcggtcgcgacatgcacgtaggcgacacgattatcggtatcaaaggccgcgtaggtttcgaagctgccgcacctatgctgattatcggagcacacaagttcctcgagaagtacactttgagcaaatggcagcaatactggaaggaccaggtagccaactggtatggcatgttcctgcacgaaagccaatatctggaaccagtaatgcgcgacatcgaagccatgctggaatcctcgcaacgcaacgtaaacggtacggctatcctcgaacttcacccgctctgcttttctaccgtaggtgtagaaagcaaagatgaccttgtgaaaaacaagtttggtgaatacggtgagatgcagaaaggatggacggcagaagatgccaagggcttcatcaaagtaacctccacagcactgcgtgcttattattcaaatcataaagacgagaaaatctaaatgaccggcaggaagcaaaaactgacacgtccccggactggaaggatgctttcaggcgtatgtgcaggactggcaaactttttcggactcgatgtctcattggtgcgtatcgtttatacgttcgccacgatctttactgcatttgcaggcatacccatatacattataatgctaattgttataccacaagaaccaaatagatattatcgaaatgattaaagtaggaatcatcggcggagccggatacacggcaggcgaactgatacgtttgctgctcaaccatccggaagcggaaatcgttttcataaacagctcaagcaacgccggcaacaaaattaccgacgtacacgaaggactgtacggcgaaacagacttggtatttaccgaccagctcccgctggaagaaatcgacgtactctttttctgtacggcacatggcgacacgaagaagttcctcgaaagccacaacgtgcccgaggaactgagaatcatcgacctctccatggactaccgcatagcctctcccgaacacgacttcatctacggcctgccggagctgaaccgccgtgccacctgcaaagcgaagcacgtagccaatccgggctgctttgccacctgcatacagctggggctgctaccgcttgccaaacatctgatgctgaatgatgatatcatggtgaacgccattaccggaagtaccggcgccggtgtgaaaccgggcgccacgagccacttcagctggcgcaacaacaacatgagtgtctacaaagctttcgagcaccagcatgtgcccgaaatcaagcaatcgctcaaacagctgcagaacagctttgatgcggacattgacttcatcccctaccgcggcgacttcccgcgcggcatcttcaccaccattgtggtgaagaccaaagtggccctggaagaaatcgtccgcatgtacgaagaatattacgccaaagattcctttacccacatcgtggagaagaatatcgacctgaagcaagtggtaaacaccaacaagtgcctcatccatctggagaagcacggcgacaaactgcttatcatttcctgcatcgataacctcctgaaaggcgccagcggacaagctgtccataacatgaatttaatgtttaacctggaagagaccgtaggtttacggttgaaaccttctgcattctaaaaaaaaatgaatttattcgacgtataccctctctttgacatcaacatcgtcaaaggaaaaggctgccatgtatgggacgagaacggtaccgaatatctcgacctctacggtggccatgcagtcatctcaatcggacatgcacatccacattatgtagagatggtgagcaatcaagttgctacgttaggattctactcaaactcagtaatcaacaagctgcaacagcaagtggcagagcgtttgggaaaggtctgcggctatgatgattactcactcttcctcatcaacagcggtgccgaagccaatgaaaacgccttgaaactcgcctctttctacaatggccgtacccgtgtgatatccttctcaaaagcattccacggacgtacctcactggcggtggaagtaacgaacaatcctaaaatcatcgctcccatcaacaactgcgggcacgtcacctacctcccgttgaacgacatcgaagccatgaaggccgaattgtccaaaggagatgtctgcgcagtgattatcgaaggcatacaaggtgtaggcggcatccaactgccgacagacgaattcatgcaggctctccgccagacttgtacggaacacaacacggtcttgattctcgatgaaatccaaagcggctacggacgcagcggcaagttcttcgcccatcagtacaacggcatcaaagccgacatcgtcaccgtggcaaaaggcatcggcaatggtttcccgatggcaggcgtactcatcagcccaatgtttacaccggtatacgggcaacttggaaccactttcggtggaaaccacctggcttgcagtgccgcccttgccgtactggacgtcatagagcaagaaaaactgatagaaaatgcagcgcaagtcggtgacttcctgatgacagaactgagaaagttcccgcaaatcaaggatgttcgcggacgaggactgatgataggactggaatttgaagcccccatcaaggtactgcgcctaagactgctgaaagagcaacatgtattcaccggcgtaagcggtacgaatgtgctccgcctgctgccgcctctgtgcctcagcatggacgaagcaaaggaattcttgaaacgcttcaagaaagttctttaatttatctacctttgccaacagacaactcttttaacaacaagaaaatatgaaaatagcaattatcggtgccggaaatatgggaggctccatcgcccgcgggctggcaaaaggaacaatcatccctgccagtgacatcattgtctccaaccccacccagaacaaattagacaaactgaaagcagaatttcccgctttgcaagtaactaatgacaatcaggaagcagtgaccggtgcggatatgataatctttgccgtgaagccatggctgatgaaacttgtagtaaaggaattgaaactgagaggcacacagattcttatctccgttgcagccggtattcccttcgaagaactgacacactatgcagcagacaaggaaatgaccatgttccgtcttattcccaatacagccatcagcgaaatggaaagcatgacactcatcgccagccgcaatgccaccaaggagcaggagcagctgatgctggacattttcaaccagatgggacttgccatgctcattcccgaggaaaagattgcggcaaccaccgccatgacttcctgcggcatcgcctatgtgctgaagtacatccaggcagctatgcaggccggcattgaaatgggcatctaccccaaagacggcatgcgcatggtggcacagtccgtgaagggagcagccgagctgattctgaacagtgacacacaccccagtgttgagattgacaaggtgtgtactcccggaggaattaccatcaagggaatcaacgaactggaacacgaaggattcacctccactgtgattaaagccatcaaagcgagtatttaatgtgccaatatgccaatgccctgcggtgtaacggtgtatttcaataacaacccatttaaaacaaatataattatggacgaacaaatcagacaaatagccgaacgcctgcgcggactgcgtgacgtattggaactgactgccgacgatatcgcccgcgactgcgacatctctgcagaagagtaccgccttgccgaaaccggagaattcgacatctcggtcagcatgctacagaagatagcacggcactacggcatatcactggacgcactgatgtttgggcaagagcccaaaatgagctcctacttcctgacacgtgccggaaaaggaaccagtatagaacgtaccaaggcatataaataccaatcactggcagccggtttcatcaaccgcacggcagacccgttcatcgtgaccgtagaaccgaaaccggacagcgagccgatacattacaacagccatgccggtcaggagttcaacctcgtactggaaggccgtatgatggtcagcatcgacggcaaagacttaatcttaaatgaaggagacagtctgtacttcaactccaaactgccgcacggcatgaaggcgcttgacggaaagactgtaaaattcctggcagtaattatgtaataaagttatggtagaaagatttttatctcaaacatccttcacctcacaggaggacttcatcaagaacttgaagataaacgtaccggagaatttcaacttcggctacgacgtagtggatgcctgggccgccgagcaacccgacaaacccgcactgttgtggaccaatgaccagggcgaatgccggcaatttacctttgccgacatgaaacggtacacagacatgacggcttcctatttccaaagcctcggcatcggccacggagacatggtgatgctgatactaaagcgccgttacgaattctggttcagcatcgtggcactacacaaactcggtgcagtggtgattcccgccacccacctgctgacgaagaaagacatcgtataccgttgcaacgccgcagacatcaagatgatagtctgcgccggcgaaagcgtcatcaccgaccatatcacggcagccatgccggagtctccttctgtgaaacgcctcgtaagcgtcgggccggaagttcccgaaggattcgaagactttcacaaaggtatcgaggttgctgctcctttcgtgaaacctgaacatccgaatacgaacgatgacatctccctgatgtacttcaccagcggcactaccggagagcccaaaatggtggcccacgacttcacctatccgttgggacacatcgtcaccggcagcttctggcacaacctgaaagagagcagcctacacctcaccattgccgacaccggttggggaaaagccgtgtggggcaagctctacggacaatggattgccggcgccaacgtatttgtatacgaccacgagaaattcactcccgcagccatactggagaagatacaagattatcacgtcacgtcgctttgtgcgccgcccaccatcttccgattcctcatccacgaagacctcacgaagtacgacctatccagtctggaatactgcaccatcgccggagaagcattgaaccccgccgtattcgagaccttcaagaagttgacgggcatcaagctgatggagggattcggacaaaccgaaacgacccttaccgttgccaccatgccgtggatggaaccgaaacccggcagcatgggattgcccaatccgcaatacgacgtagacctgatagaccacgaaggacgttccgtggaagccggtgaacagggacagattgtaatccgtaccgacaaaggcaaaccgctgggattgttcaaggaatactaccgcgatgccaaccgcacccacgaggcatggaacaacggtatttactacacgggagacgtagcctggaaggacgaagacggctacctctggttcgtaggccgcgccgacgacgtcatcaaaagcagcggctaccgcatcggtccgttcgaagtggaaagtgcattgatgacccacccagccgtagtggaatgtgccattaccggtgtgcccgatgaaatccgcggccaagtggtaaaagctacgattgtattggcaaaagagtacaaggcacgcgccggagaagagcttgtcaaggagttgcagaaccatgtgaagaaagtgacggctccctacaaatacccacgtgtcatcgaatttgttgatgagctccccaaaaccatcagcgggaaaatccgccgggtggaaatccgggagaacgaccagaaataatgctcgccacccagcatccgaatcataagacagcatccgggtgaatgaataaggagggggtaaaaccgaagtcggccattttattgacgatttcagttttaccccctctttttacaaatagttgtctcattgtgaatgtcaaaaggataaaaaaactatatttgcacgaaattaaacttcacttggaacatttataaacaagaaagaccgacacggcatatgaaaaatagaatgcagatatggaaaatactggctttcttaggagcgggacttttcttgtctgatacaatatacgcccaacaatggacatccgatagccattcggaatacaaacgggacacactccctttctcacagcgcttcatccacagattaggcgtagaagggcgtgctggctatatttttcagaccaacccttttctggagtactccaaccaccaatacaagcccatgaaaaatgcctatgccggccatctgaaatactccttccagctccgtccccacaccgttgccgaccaggcttatataggagcctatcaagggattggagtcggctatttcaacttcggcaatccggaagagctgggcaacccgctggcggtctatctgtttcaagggggacgtatcgcccaattcagcccccgcatatccttgaactatgaatggaacttcggcgcatcgttcggctggaaaccctacgatgaatacgacaacccggagaaccagattatcggctcgaaagtgaatgcttatctcaatgtgaacctctacttaaagtgggcactctccctcaagttcgacctgatgataggagctaccggaagccacttttccaacggaaacacccaatatcccaactccggtctgaacacggtggactgtaaagtggggctggtatataactttaaccgcagagcggatgagcttgcccagtcatggcaacgccctatcgttcctccattcccccgccacgtcagctacgacctgactttgttcggctcctggcgaaagaaagcagtggcccatgaaggcagtagtggccaggtacccgcacccggcacttacaacgtgttcggtttcagctttgcacccatgtacaacttcggctataaattccgcgccggtgtggcgttggacggcgtatacgaccacagtgcgaacatgaaagaatcgtacgaagaagagaacggcttctataccccgcctgccaaaaagcagatggcgctgggcttatctgcccgcggagagtttgtcatgccttacttcacggtaggtatcggtctgggagccaacgttctgcacggcggcggtgacatgaagtctttctatcagattcttgccctgaaaatagacgtaacacgcaattcgtatctccatataggatataacctccgggaatttcatgagcccaattatctgatgttgggtatcggctatcggttcaataacaaacgccccaagctgttctgaacaataaagaggaggctatttatatagattcttttatttcatctgcaagcacatattagcaagtgccacgcgcatatcatctactatatattatagttagtttgttagttcacagcgatgaacactttgttcaagtatagagaaacagtttgttccaataaggaaaaacagtttgttttcatatgatgaaacgaaatgttttgttaagggaaacactttgttcgccataatgaaacaacttgttctattaagggaaacactttgttcgctatagagaaacggtctttcatatcaagagcttataaagaaaaagctctgcaaatcaatgattcacagagcttaatcgagtactcgaagcgggacttgaacccgcacagccgcaatggccaaaggattttaagtccttcgtgtctaccattccaccattcgagcatcctaaaaagggaaaagagagcggaaaacgagactcgaactcgcgaccctaaccttggcaaggttatgctctaccaactgagctatttccgcatttggagaacgggtgcaaagataaacagttttcccgtttctgccaaatttttttttataaaagtacagtactcgcagcgggacttgaacccgcagaaccttttacctgcccagcaactctttctctgcagcttgcatggtctcaaaattgaaaccatctaccactttctgcatcaaggcagagacttcatcgttgcaaaggtttccgatactgccttcatgggtatgatgtacctctttgctgtgcgagaagtttccggcttcaatatccagtcccaccttcttgtaggcatcgcggaaaggcatcccttcacgtgccaagcggttgacttcctccacactgaaaataagcagatacttgtcatcatcaagaatatgttcgttcaccttgatttcattcataatgtaagtcgtcatctgcagacagtctttcagttcctgaaaagcaggcaggaagacctctttgataatctgcaagtcacggaaatagccggaaggaagattgttggctatcatcataatctgctggggaagggattgcagtttgttgcacttggcacgcgtcagttcaaagacgtccgggttcttcttgtgaggcatgatgctggagccggtagtgcaatcgtccggcagcttcacaaaaccgaagttctgactgttgaacatacatgcgtcaaaagccaatttcgatatggttccggccacactggcaagggcgaaagctacattacgctccattttgccacgccccatctgggcatacactacgttgtagttgagggaatcaaatcccaaaagacgggtagtcatcgtacggttcagcgggaacgaggaaccgtatcccgcagcagaacccaaaggattgcggttgcacatcttgaaagctgcctgaaggaacatcatatcgtccaccaggctctcggcatatgccccaaaccagagtccgaaagaagatggcatggctatctgcaagtgtgtataacccggcatcagtacatccttgtagcgttcgctctgcataatcagcacatggaacaattgttccacagcctccgccacttcctttatctctgcacgggtaaagagcttcaaatcgagcaacacctggtcgttgcgcgaacgtccgctgtgtattttcttacctatatcacccaagttgcgcgtcagcataagttccacttgtgagtgaacgtcttccactccctcttctatcacaaattctccacgctcggccatcgcgtagattttctttaattcggccagcaattgccgcagttcttccttcgtcaacaagccaatgctttcgagcatcgtgatgtgcgccatggaacccagcacatcgtgctttgccaaataaaggtccatttcacggtcacggcctaccgtgaagcgttcgatatccttatttacctgaacggatttttcccaaagtttctgagccacgttgtttctaatgattaatgattaatattgtatcatcgccagcatatctgccatcttctccaatccttcctgcaagggtttctgcaccatggccttcataaacggatttatatccatgccgatggtcagcttcatcttgcattcggtttcagtgacgggtacaatctgtatccacaaattgaagggcagcggtgaagtggttgttgcaaacttgatacacttgcaaggttccttctccacaatctgcaacgtaatctttcccacgggagccacctctatcgtcatgctctccgcatcaaaactcaagttcttcactttgtcttcaggcagacggtctttcaccttctccagattgctcaagtcggaaagcttttcataaacagcttcttgtgaagccggtacaactttcactccactctcaaatttcgtcataatcaatcgtattcaaaaagaaaaaagaactatccggacagaatctatccgaatggctcttttatccatattaacatttttacaaataagttcttatttcccggactcccaatgtgcagggtctttacgccattcattcagagtctccacatcttcttcctcgatatagcccgtacgcaacgccacttccatcacagcctcgtaattggtcagcgtcaccaaaggcactttggcatccttgaaggccttttcggcaaccgggaaaccataagtataggcagccaccatgccgatgacctcacatccgtcacggcggatagcctctacagcctttaagctgcttccacccgtagaaatcaaatcttccacgactaccaccttcatgccgggacgaagttcaccttcaatcagattctccagtccatggtctttcggagtggagcgtacatatacaaacggcaggttcaatgcatcggccaccaaggcaccttgcgggatagcccccgttgccacaccggcaatggcatccacctgtccgaaacgttccaaaatcagacgcgtaatttcaatcttcacgaaactacggagagaaggataagaaagggttttgcggttatcacaataaaacggagacttccatccggatgcccaagtgaacgggttagccggttgtagtttaatcgcttttatcttcagcaacttctctgcaaacaatctttctaaagttttcatagcaaaactaatctatatatgataaatatggcgcaaaaatacggaaacagaatgagaataaaaaagagaaagccgataattttcattcggagtagtcattttcctcagaaacctctatgcaacgacatatatccttcatttcgaaccctctgctcaaggcaaaacgcaccaatttgccattcaactcatactcactttcggcacggacgcttttacgctttgccaccagcagcttctgcaggacggcgtggtattcctcctcatcaatctcgttcaaatagggccaatagacagatgaagatatctttttcaactggagcgcctgccctatcttcatcttgccccatttggcaaaacggtatttgtcgttgatgaaagcgcggcagaagcgctcttcatcaatgtacttctcttgttccagacggttgatgatacggtctatggcatcataggcaatgccccagcgttgcagtttctccgcaatctccgcccggcaatgctcggcagtggagcaatatgccgccactctgttcaaagcttcagtttcagttatttctatcatcgttctgcaattacgtaccggtcgttgccggaaatatcttttcggatacggacattcgtatagccttgcttgcgaagcatcgaagcgacagcctctccaaatgcccggttgatttcaaaatagagtcggccgccggccgtcagcatgctccgtcccagttcacctatacgccgatagaaacggagcgggtcgctatctggaacaaacaaagcccgtgagggttcccagttcaagacgtttggttccatatcccgcttttctgtttccgtaacataaggcggattactgacgattacatcaaaacattcaccctcaaccggttgatacgtcaggacatcacgctgtacaaatagcacggaggcctgcaaaaggtggttattgtcgccggctatggcaagagcttctccggaaatgtcccaagctgttacttccgcctccggcaactccttagacaaagtgacggcaatacacccgcttccggtgccaatgtcgagaatacgggaaaccggagcgacttccttcagcatcctctccaccagttcttccgtttcgggacggggaataagcacccccggagccacccgaaaagtacgccccaggaaacgggaagtaccctgcacatactgtatgggctcaaaattgcacagacgagaaagaatgctttccaattccctttcatcgtttggagataaaatcatatctttgcccaggtaatagtcaatattaccctgaccaaacatttcacagcagacaatacgggaaagattggccgcctcccggggagggtagcattcctgcaaagcactgcggatatgtgaaacggttacattcattcggggtccggttttattcgggctgcaaaagtaatcattaattttgattattcaaccaaaaggtaagcaaggatatgaattcagaagaagagaaatacatgctgcgatgtatccaactggcacaaaacgggctatgcaatgcagcacccaacccgatggtgggggcggtaatagtatgtgacgggaaaatcataggcgagggataccatgtgcgctgtggagaagcccacgccgaggtcaacgccatccgttccgtgaaagacacgtccctgctgaaacgttccaccatctatgtcagcctggaaccgtgttcgcactatggcaaaactcctccttgtgcagacctcatcatcgagaagcagattccacgtatcgtcatcgggtgccgggaccctttttctaaggttgcgggccggggcatacagaaactgaaggatgccggacgtgaagttattgtcggagtgctggaaacagaatgtcggcagctcatccgcaggttcatcactttccatactttgcgacgcccctacatcaccctaaaatgggcggaatcttctgacagatatatcgattactcccgcacggacggtaaaccagttatcctctccagcctgctgacttcgatgctggtacacaagaaacgggcagagcacagtgccatattagtaggtacccgtacggctgaactggacaatcccggcctgaatgtccgccattggtacggctgttcaccggtacgtatcgtgctggaccggcaacaaaagctatcccccaaccttcacctatttgacggtagcgtgccgaccctcgtttttacagaagccccgcacgctccgctaccgaatgtagagtatctgccagtcagcgactaccggcgggatgtactccccgaaatcatggaaacgctgtatacacgcggattacaatcccttttggtagagggtggcagccaaacgctccaatccttcattgatgccggattgtgggacgaaatctttgtggaagaagctccgtaccttcttcattccggcgtcaaagcacccgaaatcagtgacggatatccatttgcaacagagtattcttttggcaggagttttcgccattatacggcctcaagaaacagtcaatagcctcatttcagggcttttttatcgagaaaaagggggatattatctataattttatataaaacttccccgtaaagctgtttatagaaaaaaatgttcctatttttgcaacttgtaaataaacactaactttcaaaatgagaataaagtttctatcagtaattgtgagttttcttattgtgtcatttgctctaagttcatgccttgactctgacgacaattatgaattcagctccgatgctactatacatgcttttggtatcgataccatacatggcaaacattacaaatttacaattgaccagctcaatagactcatctataacagagactcattgcctgtaggttcagacaccatcattgaccgtattctgattgatactatgaccgttaccggttggataacttcaggctcgcctaccgacacggtattcgtcatatcggactccgtggatttgagacccgccatgaacaacgatgccggcatgctgttcaaagcacatgccgccgacggcgttacagtccgcgaatataaactgaaagttaatgtacatctgcaagacccggactcactcgtttggacagacatgcagaaaagaggaaatgtattctccaataccatcaattcaggtcagcaaaaagcggttgtactgggagacgaactatttgtctacacttccaacactactgcttacaagacatcgactgcgcccgataaatacaactggagcaaagtcaatgtcagcaacctcccctcagacgtaaagctgacatctgccgtagagtataacagtgcgctttatatggttacagaaagcaaaagagtattcagttccaccaacggcgccgcctggacagaagtcactacattgggagacaatgttatagtcctcatcaatggtttctccgaccggctctcgggtattgtggaaatcaacggaaagcaatatttcaacatctgtaaagacggaaagaattgggaagcggaaaacactgctgacaaccttatccttgaagaagtcccggcaggattccctaccgaaaacatatccaccacccagaccagcaccggcaatggtgtagagaaggtggttctggcaggaatgccgctagccaacgaaaaagagacaacaccttggttctcattggacggcaaaggttgggcaagcctggccaacaccatgtatgacacatattgtcccggcatggacaacccagccatcatgtactatggcggcatgttctattgcttcggaggggaacttgacgctatctacagctccatcaccggcattgcatggagcaagacagaaaccaaattcctgttaccccaggaattcaaaggaaaaggcgcgtactccattatagtggaaccgacaaaagacaaaactgtggccccggcagacaaacgggacttcatttgggtgatattcggcggtaacggcaccaaaaatgaagtatggcgcggacgtcttaacagattgggcttcgaaatacaataataatgatgtcatataaggaagaaatcgatctaaaccggataccccagcacgtggcgattatcatggacggtaacggacggtgggccaagcagcgtggacacgaacgcagctatggacatcaggccggcgcagagactgtgcacgtcattgcagaggaagccgctaaattaggagtcagataccttactttatatacgttctctaccgagaactggaatcgtccgtcggacgaggtagctgccttgatggggctgctcttcgactccatagaggaagagacgttcatgaagaacaatatcagtttccgagtaataggagatattgaaaaactgccagtcaacgtacagcaacggctcaacacttgcgtggcacacacctcccacaacacgggaatgtgcctggtgctggcattgagctactcttcccgctgggaaataacggaggctgcccggcaaatagccggtttggtacagaaaggtgagttgaaacccgaacaaatcgacagtgagctcatatcccgtcatctgacgacccacttcatgcccgaccccgacctgctgatacgtaccggaggagagctccgcctcagtaactacatgctctggcaatgcgcctattcggaactttatttctgtgatacctattggcccgacttccgtgaagaagaactacgcaaagccatatgtgactatcagaaacgcgaacgcaggttcggcaagaccagcgagcaaatcaattaatcaccggacacacaaatagtaaatagtaaattgtaaaatagtaaataaaaagatgcactatcgtattttctccatactcgtaacgtttgtctgccttttcggctgcgcactgacaacagcagcacaggacgtaaacaacaccgatgaaaccgaaaagccggttatactctattcgggaacccccaagaagtatgaaatagccgacattaaggtcgaaggagcccagaactatgaagattatgtaattgtcggattgtccggactatccaaagggcagactatcaccgtgccgggtgacgagattacacaagcttgtaagcgctactggcgccacggtctgttctctgacgtggaaattacagcagacaagattgaaggcgaccaaatttggctgaccattcatctgaccatgcgtccgcgtgtttccgacatacgctacaacggtgtgaagaagtcggagcgtgaagacctggaaagcagaatcggcatgataaagggcggtcagattacacctaacctggtggaccgcgccaagaccctgataaagcgctactttgacgacaagggcttcaagaatgcagatgtaatcatcacccaacgtgatgatccagaaaagaagaatgaagtgattgtcaacatcgacatcgacaagaaggagaaagtgaaagtacatcaaatcaccattgtaggcaacgaggccctcacgaccaagaagctgaagcgtgtgatgaagaaaacaaacgaaaagggcaagctgctcaatctgttccgcaccaagaaattcattgaggacaactacgaagcggacaaacaactgattatcgacaaatacaacgaactgggttatcgtgacgccatcatcgtgacagacagtatcaagccctacgatgaccgcacggtagacatcttcatgcagattgaggaaggacagaaatactacctccgcaatgtaacctgggtaggtaacacactgtatccttccgaacaactgaacttcctcctccagatgaagaagggtgacgtctacaaccaaaagttacttgaagaacgtacaatgaccgatgacgatgccatcggcaacctctactacaacaacggttatctgttctacagcctcgaaccggtggaagtaaacatcgtgggcgactccatcgacctggaaatgcgtatctacgaaggccgccaggctaccatcaataaagtcagcatcaacggtaacgaccgtttgtatgaaaacgtagtacgccgtgaactccgtacccgtccgggcgaactcttcagccgtgaagacctgatgcgttccatgcgtgaaatccagcagatgggacacttcgaccccgaacaaatccaacccgacatccagccgagaccggaagacggcacggtagacatcggttatgaccttgtatccaaagccaacgaccaggtagagttctccgccggttggggacaaacaggtattatcggtaagttaagtctgaagttcactaacttctctctggccaacctgcttcacccgggtgagaactaccgcggtatcctcccgcaaggtgacggccagacattgaccatcagcggccagaccaatgccaaatactatcagtcatacagcgtttcattctacgacccgtggtttggcggtaaacgcccgaatgcattctccgtatcggctttctattcccgccagaccgacatcagtagccgttattacaattcggcctacatgaacagctattacaacagctattatagtggtatgtatggctacggtatgtacaactacggcaattacaacaactacgagaactattacgacccggacaaatctatccagatgtatggtcttgcagtgatgttcggtaagcgcttgaagtggccggatgactatttccaattcacagccgagttgtcttaccaacgctatgttctgagtgactggcagtacttcccggttaccaacggtaagtgtaataacctcagcctcaacttgaccttgtcccgtagctctatcgacaacccgatttatccgcgccaaggttccgagttctcgttgtctgcacaaatcacaccgcctttctctctgttcgacggtaccgattacagcaagtacagcaccagcagccaggaagacatgaacaagatgcacaagtggattgaataccacaagtggaaattcaaatccaaaatctatatcccgttaatggatccgattaccgttaaacgtactccggtattgatgggacgtgtagaattcggtttgctgggacattacaacaaatacaaaaagtctccgttcgaaacgtttgacgtgggtggtgacggtatgaccggctactccagctatgctacagaaagtatcgcacttcgtggttatgagaacagttcattgactccatacggttctgaaggttatgcctatacacgtctcggactggaattaagatatcctttgatgctcgaaacaagtaccagtatttatgcgttaacgtttgtggaagccggtaatgcatggcatgatgtcaataagttcaacccgttcgagttgaaacgttcagccggtgtcggtgtccgtatcttcctcccgatgattggtatgatggggattgactgggcttacggtttcgacaaaataatgggttcctcgcaatatggcggtagccagttccacttcatcctgggacaagaattctaagcaatggacgatagacaattatccatcgtcaattaaataaatatcgttatgaagaagagtttattgatcctttttacgctgtttgcagtaagtataacagccggtgcacagaagttcgccttgattgacatggaatatatcctgaaaaatattcctgcttacgaacgtgccaatgaacaactggaacaagcctccagacaatggcagagtgaagtcgaaaagatttccgaagaagccaagactctgtacaagaactatcagtctcagattgcttccctttctgaaacacaaagaggcaaaaaggaagaagagattgtcgctaaagagaaatcggcagccgagctacgccgcaaatacttcggtccggaaggcgaactgtataaaaaacgtgaaagtctgatgcaacccattcaagatgaaatatacaatgctgtaaaggaaattgctacacagaacggatatgcggtagttgtagaccgtgcttccgcatcaagtatcatttttgcctcgccaagtattgacgtcagcaatgaagtacttgcaaaactgggatattcaaattaatttcatacatttgtttcagaatatagactgcattcaagattaaaaataagcttgcttattttgtattgcgttcagtttgcgctatatttgcccccgacgaataatcattcaaataaataataaacattatgcttaaaaaaatcgcactactcgtagttatgttcgccctcccgctgggagctatggcgcaagctaaattcgctcacatgaattctcaagatgtaatcgctgttatgcctgaatttaccaaagcccaagctgacttggacgccatgtctaaaaaataccaggatgaaatgcagcgtaccaacgaagaattccaaaagaagtaccaagaattcctggcacaagccgactctctgccgaaaaacattgcagaaagacgtcagaaagagctgcaggatatggctcaacgtcaggaacagttccaacaagaagcttatcaaagtatgcagaaagcacagcaagatgctatggctcccatctataagaaactggacgaagccatccaagctgtcggcaaaactgaaggtgttgtctacatttttgacttagcccgtaccccgataccattcgtaggagcacagagcgttgatgtaactgccaaagtcaaaacgcaattgggcattaaataatagaattatttatgataaagcaagcgcggatagttttatccgcgcttattttttatacattactgagaaatttgaattatctttgcatggtacatagcctttagaacgcatgaaacagacattaccttctgcagccggtcccatcggaatattcgattccggatatggcggactgaccatcctaagcaagatacgggaagtccttccccaatatgactacatttacctgggcgacaacgcacgtgcgccttacgggacccgctcattcgagattgtctatgagttcaccttgcaggcagtcaccaaactgttcgagatgggatgccatcttgtcatcctggcatgcaatacagcttcggcaaaagccctgcgcaacatacaaatgaatgatttgccccgcctcgacccaatgcgtcgtgtgttgggagtaatccgcccaaccgtagaatgcatagggaacataacccaaagccgccatgtgggagtgcttgccacagcaggaaccatcaagtctgaatcctatccgctggaagtgcataaactcttccccgacatcaaagtgagcggtgaagcctgccctctatgggtatccctcgtagaaaacaacgaggcacaaggtgagggtaccgactacttcatacgcaagaacatcggcaacctgctggccaaagacacacagatagataccgtcattctaggctgcacgcacttcccgctgctgctgcccaagatacagcaatacatgcccgacggcatcacgaccgtcacccaaggggaactggtggcagacagtctgaaagactatcttcaccgtcatccggaaatggacaaaaaatgtaccaaaggtggaagatgcgtctaccgcaccacggaatcggaggagaaattcacagaatcggcttctactttcctgaatgaatcgataagagttgagaggattgaactataaatccgtcagcattaaacattaaaacaaaaacatttgttatatttgtaagacagaaacctctaaattcttaccatcatgaaagaagaagataaaagcaaactcgttgaggtgttcaccggttcaccgtgggaagcagaacttgtaaagagcctgctgggaaatagtgatattgaagctgtaacaaaagacggaatggtagtaaacgttgtactgcctgccactgcggtagatgtttccgttctcgtcaatgagaaggactacgaagccgccatggaagtagtccgtgaatacgaaaagagagaaaatggagattgatttcaatagaattgctgtcaaggtaggcagcaatgttttgacacgtcgtgacggcactctcgacgtcacccgcatgtccgctttggtggaccagatagccgagttgcacaaggccggcatagaaataatacttgtttcttccggagccgttgcttcgggacgtagcgaagtgcgccccaccaagaagttggacagcgtagaccagcgccagctcttttccgctgtagggcaggccaagctcatcaaccgttactacgaactgttccgggagcatggaatccccgtgggacaagtgctcacaatgaaagagaacttttccacccgccgccattacctcaaccagaaaaactgtatgaccgtaatgctggagaacggcgtcattcctattgtcaatgagaacgacaccatctccgtgagcgaactgatgttcaccgacaacgatgagctgtccggcctgatagcctccatgatggatgcccaggcactaatcattctcagcaatatagacggtatctacaacggttcacccgccgacccgaattctcaggtcatccgtgaaatagaacaaggcaaagacctctcctcctacatacaaacttccaaatccagcttcggacgcggcggtatgctgacaaaaaccaacattgcccgcaaagtggcggatgagggcatcacagtaatcatagccaatgggaagcgggacaacatcctcgtgaaaataatgaagaatgaagaattaaactatacccgtttcattccatctccggaaccggtatcgagcatcaagaaatggattgcacacagcgaagggtttgccaaaggggaactgcacatcaatcattgtgccaccgaactgctcttctcggacaaagcagtaagcatcctaccggtaggtatcactgacgttataggcgagttcgagaaggacgacatcgtacggattatcgacttcggcggtaaacccatcggtgtgggaaaagccaactgtgactccagccaggcacgggaaacgatgggaaaacatggaaagaaacccgtagtgcactacgactacctatatatagaataagccacagacggatactatcccacaatatatatacttgcatatttatcactctatattcaataaaaaaatgaacttaaacaaaacttttgtcgccgtacaagatgccagccgtaacatgttagcgttgagcgacaaagaaatcaatcaaatattactggctgttgcagacgctgccataaacaaaacagacttcattctgagtgaaaaccagaaggatttggagcgtatgccttctaccgaccctaaatacgaccgcctgaaactgacaaaaagccgtttgcaggacatcgctgcggacatccgcaacgtagctgccctcccttctcctctgggaaaagtccttaaagagaacgtattacccaacggattgaagataaaaagggtcagtgtacctttcggcgtcataggcattatctacgaagcccgtcccaacgtcagtttcgatgtcttctcactctgccttaaaagcggcaatgcctgtattctgaaaggcggaagcgatgcagactattccaaccgtgccataatcagcgtgatacacgaggtactggagcatttcaacgtagatacacatatcgtagaactgcttcctgccgacagagaagcgactgccgaactactgcatgccaacgattatgtagatttgataattccgcgcggcagcagcagcctgataaatttcgtacgccagaatgccacagtaccggttatagagacaggtgccggcgtatgccatgcgttcttcgaccgctatggcgatataagcataggtccatccatcattgccaatgcaaagacacgccgtgtcagtgtatgcaacgctttggattgcctgattatcgaagccgacagcctggctgatttgcccggcctatgcctgccgctacaatcaagcaatgtagagatatttgccgatgaacccgcctaccacagtctgcgtgacaaatatcccgtcgagctgttgagacttgccactgaagactgctacggcagagagttcctggactacaagatggccattaaaaccgtgaattctttccaggaagcattggcacatatccgggagtacggttccaaacatagcgaatgcatcattacggacgacaagacacgtgccgaatggttctgccgggaagtggacgccgcttgcgtatacgtcaatgcaccgacctctttcaccgacggcgcacaattcgggctcggtgccgagatcggcatcagcacacagaagctgcacgcccgcggtccgatggctctggaagaaatcaccacatacaaatggattgttgaaggttccggacagaccagaccttgacagccgaataacaaagatatagatacactaaaaagactgtaaatatgaagaactttacttgcgtgcaggacatcggtaacctgaagtctgcactggacgaagcattcgagattaaaaaagaccgtttcaaatatgtggaactgggacgtaacaaaacgttgatgatgattttcttcaactccagcctgcgcacccgcctcagtacacagaaggcggcactgaacctgggcatgaacgtcattgtactggacatcaaccagggagcctggaaactggagacagagcgtggcgtcatcatggacggtgacaaaccggaacacttactggaagccattcccgtgatgggctgctattgcgacgtcatcggcgtacgttcttttgcacgtttcgaaagtaaggaagacgattacaacgaagtgatactggagcagttcatcaagcattccggccggccggtattctccatggaggctgccacacgccatccgctgcagagttttgccgacctgataaccattgaggaatataagaagacggcacgccccaaagtagtgatgacatgggctccacatccgcgtccattgcctcaggctgtccccaactcctttgccgaatggatgaatgcaactgattatgactttgtgattacacatcccgaaggttatgaactcgaccccaagttcgtaggaaatgcccgcgtagaatatgaccagatgaaagcttttgaaggggccgattttgtctatgccaagaactgggcggcctatacaggcgacaactacggacaaatattgagcaaagaccgcacctggacagtaggcgagcgccagatggccgttaccaacaatgcctacttcatgcactgcctgccggttcgacgcaacatgattgtgacggatgatgtgatagaaagcccgcagtccatcgtaatccccgaagcggccaaccgggagatttcagcaacagtggtgctgaagagactgcttgaaagcctctaaccagaggacaagactactttattctttttaggcgcggattacgcggaaaacgcggattcttttcttaaatttttccgtgaaatccgcgtaatccgcgcctaaaaagaaattatagcaaatgcatttcagctgcaccgctattacttttccacttccttgcccgcttcttcccaaccgatgaaacctttgtcaaggtcatagattatatatccttttttgctcagtatggcagcggcctttttactacgcttaccactacgacaatatactgcaaccggtttgtccttctgcagagtggagtcggccatcgtttcaaacgactcatccagcacattgatattgatactgtagggcacgtgtccttccgagtattcggcaacagtacgcacatccagaagctgcacctccggattggctatcaatgtggaaaagtcatctaccgaaacagacttgaactgtccctccttctgctggcaggaaaagagggtggtaaaaacgaggcaaaagcccgcgaacaatgtcttcatcgaatatttcattttagtcagggttataaacaaaatcgtaagtcttgatgtcaccggaataagtgtgcacactgaaatgaaccataaccttctgtatacccactgccgcatactgccgcaaaggtacggaagcgtaggcacgtctggtataagacactacctcctcctttgcgtcatgatacagcgtcagatatacttcactacacccgatagcagtatccacaatcacttcatcctcaacaaaatggaacttatgctcaccattctccttgactatcagtgtcatattgagatagtcgagtcccatccagatacccagcacatcagtagggtctgtcctgacgccctcctcgaacttgtcagccgtttggggagcgacagaaagaacaccgctcaaggcatacagcaccgcaccggcagttccatcggcagttacctccgaagcataattactgatgacacgtaccgaggcgtttgcctctatgttcgtctttgtcttgtcctccactaccggcaaggtttccccttcatccgtcacaacagactgcagatagccgtcagcccccgaaaaggcagtcaggaactccagcttcacggaaggataatgataatcatcatcgccacaaccagtcaacagacaggccaacaaaggcaaaagccaccaatcacagtacttcttcatgtattcattcttttatagccgccagataattcttcaacgggttggcatacatcagcagcatttttccgcgcaggaagtccacgtccttattgggaatggagatacgctccaactgttgttctatataggccgtgaagcgctgcttatccccggcagtgtaatggtcggaaaaatcctccttcccctcgagaaggtcgtgcgccacataattattgggatacatccggtagctggcatgaatacgtttgtctatcagtgcagacatgcgtgcaaagagttcgggcttcggaagtgaacggtctatcttcgccaattcatcattcatgcaggcacccgtctggaaatgtacccgccctttatagccgaacagtccggtctgcatattcagcaagtcgtcagccgtcgttttcttatagccttcaatgtcccgtttcagttggaactcctgcgctttcaggaagtcgcaagggtcgtattcataggaaatggcaagcggagctatgttcatttccatcaagcggtcaatgacgtcgccttcaccgcctattgccagcatcttcagcacactgtcctgcgtgcggtcgttggagtccttggcacgcccttcgcgttgtgcaatccagatagactgtttcttctcactgatggtatagtgcatatagcgggacatgcgtgcggaagcctccagcatctggcgcatggtcaacgcacgctgcacgatgaaggacttgttgacacgcacgaatttcttaatccacggatagacaagcaggttgtcgccaatggctatctctaccgtatccataccctggtctaccaacagaatggacaagaaaccggaatcgagaataatgtcgcgatggttggagacataggtatatgctgccgacttgtccggcaacgctgtatggtccagagtcaatccatccgtagcctccttcgccagcttccacagaagcccatagcagaaagtcttctgaaactccagcttggttttacacgcgcgcattttctgcgaccatacttcaaaaggtacacccggcatcacagtatccactgcctgccggaacgccgcatcggcaatcagttcctcatagacttgaggaagttcctcatcatgataaggacggatttcatcaaattccacgttcgcattcataatgaataatgattaatccttaaacttgttttctataatatctgtcattacatccttcatctccattccggcagcgcgaacctgctggggaataaagctggtggcagtcattccgggggtggtattcacctccagcagattgattttttccccttcggtaatgatatagtccacacggataatgccgtaggccccgagtatatcataaatggcagaagtcagcgtctgcacccggcgggtcaaatcgtccgagatgcgggcgggagtaatctcgtcagacgcaccattatacttagcttcataatcgaagtactcgttgtagctcaccacctccgtaatggggaacactacggacttgtcttttgttttgtaacagccgcaggtaatctcggttccgtccataaaggcctccaccagtacttcctgcgcttccgcaaatgccttggctatggcaggttgtatctgctctttcgccgtcaccttggtcacgccgaagctggaacctcccaagctgggcttaatgaagcaaggcagaccgattttctccatcacatcttcatccgtcaccgactgtccgccgcgcagcaacaacgattcggcaatgcgcacaccgaaacctttcagatactggttgcaggcaaacttatcgtacgtgagcgacgctgccagtactccgcaacacgaataagggatatggagcatatcaaaatagccctgcagacggccgtcctcacccggagttccgtggatggtaatataggcaaagtcgaatgtcactttctcgccacccagcacgaagctgaagtcattgcggtctaccggagccttggcgccgtcgggcagctgtacatgccagtccagtccgtgcatttctacaatatataaggtatacttctccttgtcgatgaaggagtaaatcccctgtgcactacgcagggagacgtggaattcggaggtatctcctccggctacaatagcaatcgtgcgtttcattctaattctctgttactgatatagcctctccatttgtctatcagccgggtcatgtcatcgggcaattccgaagtgaagtacatttcttctccggtgacgggatgcacaaaccccagcgtcatggcatgcaatgcctgccgcggacaagtgtcgaagcagttgtttacaaattgtttgtatttggcaaaatgggttcctttcaggatttcgtgtccgccgtaacgttcgtcgttgaaaagtatgtgtccgatgtgcttcatgtgcacacggatttgatgggtgcgtcccgtttcaaggatacactccaccaatgtgacgtatcccaaacgttcaagcacccggtaatgggtgacggcatgctttccctggtcgtcgggaaggacggtcatctgcatgcggtctctgggattacggccgatattgccgacaacggtcccttcatcctgttccacatttccccagaccagcgcccggtaacggcgttttgtcgtcttgttgaagaactggttgccgagattcgtcttggcatccggagtcttggctatcaccagcaggccggaggtgtccttgtcgatgcggtgcaccagtcccacatgcgggtcattggcatcataatcgggattatccttcatgtgccaggctatggcgttgacaagcgtaccgtgatagttgccatgaccggggtgcaccaccagaccggcaggtttgttcactaccatcagatacttgtcctcatatactatatcaagggggatgtcttcggggatgacttcattctcatagcgtggacggtccatcatcacagtgattacatccatcggcttcaccttatagctgcttttcacagccttgccgttcgccatcacgaagcctgcatcggcagccttctggatgcgattacgcgaggagttcgtcaagcggtcgaacagatacttgtccacccgcaccatctcctgccccttgtccaccaccacacggaagtgttcatagagttgcgcctcgtcacccaccggctctacgtcgtccagctcatcattatctatatcatccggcaattcttctatcatcacggcatttacaatttgactatttacaatttacgattggagtcagatgtttatcagaaccaggactcatctgccgcggagtcttcggacaacacgggttcaacggtacctcccacggcatccactcccagggagtctgccttcaaggcgcctccatctcccaccatcagcgtcagcactgcgccggtgggcactttctcgccgatggaaagctgacgccccttatacttcacgccatacacccagtccttctcacccggaatatactgtatctcggccagcttgaagcccgaagccagaatacgcgcttccgcctgccgcagcgaactgttgtccgccacatcgggcactatgtgcagagggacttcaatcgtattgattgtaagatagatggtacgtccttcctttaccttttgtccggctaccggattatattcgaggatgcagccggcaggaagagtcttgacataactggaatccgaaacgatgcagaccaagccgcggttacggaacattttctcggcttcctccactcccatacccttcacatcgggcactatcacagcctcgccgtggcgggtatatatatccagtcctttcagcactccgaacagcaatcccactaccacaacggccatcgcaaggatgttcgcccagaagaaccggttctgccggaaagagaaaaaatcttttattgtcataatcgataatgcattatttgggacaaagatacaattttcaccacatagtacacggagttggcaatagttttttccggagaaccgggcacaatacataagaaaagctgcaaaagaccagaatcagtcttttgcagctcccttatttctttaatacgaacgagaacggcctattatgcctttactccgttgtattcgtcagaaacagtcagtttctttctgcctttagcacgacgtgctgccaatactctgcggccgtttgctgtagccattctctcacggaaaccgtgtttgttctttctctttctgttcgagggttgaaatgttcttttcattactgtatcttgttttatgttattattctcacgaattcgggctgcaaaaataggtacttttttcaaataaaccaagagataactcattttctctcaaaagtttttgtgttttttaccgaattccattacttttgcacccgcaaaccagcactaaagaagtaaataccaatataataatattaaagactataagtatgattaatgcccaagacattaaaatcggaacttgcatccgcatggacggcaagctgtatttctgcatcgacttcctgcatgtaaagccgggaaaaggtaataccttcatgcgtaccaagctgaaagacgtggtgaacggctacgttctggaacgtcgtttcaacatcggtgagaaactggaagacgtgcgtgtagaacgtcgtccccaccaatacctctatcatgacggtgacaactaccaattcatgaaccaggagacttttgaccaaattcccatcgcccacgacctcatcaacggtgttgacttcttgctcgaaggaatgatagtagacgtggtatcagacgcttccacagaaaccgtgctctatgccgacgtgcccatcaaggttcagcagaagattacctatacggaaccgggactgaaaggcgacacagccaccaacacgctgaagcccgctacagtagaatccggcgccacagtccgcgtccccttgttcatcaacgaaggcgagactatcgaaatcgatacgcgcgacggttcttacgtaagccgcgtaaaagcataatcccttttggaaatcaggcaaatgcccttttcatatcatccccggtgctccacttggcatccggggatttttctttccatttattcatctgcaaagcttaaatgatatatctttgcggagacaaccaaaacataaagccatacccatgagatactccgtcatcatccccgtatacaaccgccccgatgaggtggatgaactgctgcaaagcctgacgcagcaaagtttcaaggattttgaagtgattgtggtggaggacggctcctccatcccctgcaagccggtcacagagaagtatcaggaactattggacgtgcattactatgacaagcccaactccggccccgggcagacccgtaactacggggcggaacgaagcaagggcgaatacctgataatactggattcggactgcatcctgcccgaaggttatttccttgctgtggaagaagagctacagcacgaagccgccgatgccttcggaggccccgaccgcgcgcacgaatcattcacagacatacagaaagccatcaactactccatgacctccttcttcaccaccggcggtatccgtggggggaagaagaagatggacaagttctatccgcgcagcttcaacatgggtgtgcggcaggaagtgtaccaagccctgggcggattctcgcggatgcgcttcggggaggacatcgacttcagcatccgaatcttcaagggaggatatacatgccggctgttccccggtgcctgggtataccacaagcgacggacagactttcggaagttcttcaagcaggtacacaattccgggattgcccgcatcaatctgtacaagaagtatccggaatctctgaagctcgtccacctgctgccggctgcatttaccctgggagtggccatattcctgctgggaacgcccttctgcccgtacagcctgctgcccatcgctctttatgcgcttctggtatgcatggactccactatccggaaccgtagcctcagcatcgggctctactccgtcgccgccgccttcatccagctcatcggatacgggacggggttcctgcgcgcctggtggaaccgctgcatacttggcaaggacgagttcgaggcgttcaaaaagaacttttacaaataaggaggattaggggttaaggattagggatgatatggagaaactgaatatcaaccagtgggctgcagaggaccgcccgcgggaaaagatgatgcagaaaggggcggaagccttgagcgatgccgaactgctagccatcctcatcggctccggcaatacggaagaaaccgccgtgacactgatgcagcgcatactcgccgcctgcggcaacgacctcaaccgcctgggcaaatgggaggtgcgggacttctcccgattcaaaggcatgggccccgccaaaagcatcaccgtcatggcatccctggaactgggcaaacgccgcaagctgcaggaacgctccggacgtaccgccatccgctcttccgccgacatctacgagctgttccatcccctgctctgcgaccttgccacagaagaattctgggtactgcttatgaaccacgccgccaaagtgatagacaaggtacgcatcagccgcggcggcatcgaccagactaccgccgacgtgcgcagcatcctgcgcgaagccctgctgcaacgcgccacacagatagcccttatccacaaccatccctccggcaacccgcaccccagtaacgacgaccaacggctgacggaactcgtgaggaaagccgcccaaaccatgaacatacacctgaccgaccacgtcatcgtcacggacggaagccattacagcttcaacgacgaaggattgctataaataatccaagttacggacatactatacgaaagacaaaagcggtcataacactaactatcagcacattgtatttacctgctatttaccagccaatgtaaaagccgttaccgcggtatgtaaaagccgttaccctatattgtaacgccctttaccccatattgtaaagacctttaccgcctattgtaaaaggagtttccccaggggtaaagggagttcccccagcgggtgaagcgtgtttccccaccgtcaaaccctttctgaagtaatgaaaaggagggcgttcctttgcattttcaattaaattccatagctttgttctttgaaaacctatatataaaaccctacgaatatgaccaaatttgaaatagaagagaaaatagtctccatgctcaagaccgtattcgacccggaaataccggtaaatgtatacgacctgggactgatttacaaaatagacgtctccgaccagggagaagcctccatcgacatgacgctgactgcccccaactgtccggcagccgacttcatcatggaagatgtgcgccagaaggtggaatccatcgacggcgtaacctccgccaccatcaatctcgtcttcgaacccgagtgggacaaggacatgatgagcgaagaagcgaaactggaactgggattcctttaaatcagttgaaagttcaaagttgaaaatggaaagttgaaaatgaagaatgtatatttcctctcggatgctcacctgggctcacgagccatcgaacacggacgaacccaagaacggaggctggtcaacttcttggacagcatcaagcacaaggcatcggccgtatacctgctgggagacatgttcgacttctggtacgaattccgtaccgtagtgcccaaaggatacacccgctttctgggcaagctgtccgaactgaccgacctgggagtagaagtccactttttcacgggaaaccatgacctttggtgcggcgactatctgaccaaggagtgcggcgtcatgatacaccgcgaaccgctgaccaccgaaatcttcggaaaagagttctaccttgcccacggtgacgggctaggcgacccggacaagaagttcaagatgctgcgcgccatgttccgcagccgtaccctacagacactgttctctgccctgcacccccgctggagcatggagctgggactgaactgggccaagcacagccgcttgaaacgcatagacgggaaagaacccgcatacatgggagaaaacaacgaatacctggtgctctacaccaaggaatacctaaaaagccatcccaacatcaactacttcatctacggtcaccgccacatcgaactggacctaatgctgagcagtaccgcccgcatcctcatcctcggcgactggataaactacttctcgtacgccgtctttgacggcgagaacctcttccttgagaattttgtggagggagagacgaagctataacccgcatttccaaactgttaaccatcataccattaccacccatgaaacctttaagactgaaaaacatgattgccggatgcctgctcgcagcaggagcattgccggtatggggacaatccggcgccccgacacttgtcatccgcattgacgatctcggtgccctgcattccgtcaacgaagcctgcatccagacctaccgctcgggtattgcccgcagcgtggaagtgatgcccgtagcagcctggtatccagaagccatcaagatgctgaaagaaaatccgggactggacgtcggcctgcacctcgtcatcaccagcgagtgggagaacgtgaagtggcgtccgctgacccactgccccagcctgacggacgagaacggctatttctacccgatgatgttccctaaccccgcctatccgggacagtccatcatggagcagaaatgggacatcaaggagatagagcaggagttccgcgcgcagatagagacgacgctgaaaagcattccgcaactcagccatctgtccggacacatgctctccaccggtttcagcaaggaagtgaacgagctggtgcaacggctcgccaaagaatacaacctgccgtccatcgaccgcatggactcctccaaggactaccggtttacctacatcgggtacgacggccccaaaagaaccgccgaagaaaaggaggccagcttcatcaaagcattggagaagttgcaaccaggccagcgctaccttttcttagaccacccggcactggacaacgatgaaatgaaaaccgtcttccacatcggatatgaggacgtggcgctggaccgccagggagtgaccgacctgctgacaaccccccgcgtccggaaagccattgaagacaaaggcataaagctgatttccatcaaccaactgaccaagggcctgccccgcgtcgccgctactccgaagctggacaaggccatgaacagatatctggatgccgtaaagaaagccggacaagacctgcacagtatcatgattgtgcaacacggcaatgtcattgccgaagaatggatgggcgaagggaaagaggatgagcctcacatcctgaactccgtcagcaagacattcaccgccaccgccgtgggacttgccgcctccgaaggcaggctgaagctgacggacaaggtcatctccttcttccccgacaagcttccggcaaccgtcagcgaaaatctggcagccatgaccgtacgcgacctgctgaccatgaactgcgggcacgacaccgaccccaccggaacggtacgcaaaaaggcggacgccgattgggtgcaggagttccttgccttccccgtggagcacaagcccggtaccttctacacctacaacagcctgggaacctacatgctctcagccatcgtacagaaagtgacgggcgagaaagtggtggattatctctatccccgtctgttccgcccgcttggcatcgtcaacgcccggtggcaggaaagcccgcaaggcatcaataccggaggctgggggttgtacctcaaaacggaagaccttgccaagatgggacaactgttcctgcagaaaggaaactggaacggacagcagattctgcccgaaaaatgggtaaaggaggcatctgcctgccaagtgccctcactgcccgccggcatgaaaccggagatgctgaagaaagcgaagatgagcgccaagacaagcgactggctgcagggctacggctaccagatgtggcgctgccgccacaacgcctaccgtgccgatggtgccaacggacaatacatactggtgttgccggacaaggatgccgtcattgccgtcaccgccaacatccccgacatgcaggcagagctgaatctaatatggaagtacctgctgcccgcgctataaaacgtttattcttataaatgattacaaaaaagtgaaggtcaccggaactttttcccggcatggttgtagtaatatcataacattaaaaacattagcgtcatggatgatatgatttacagaaacgacccgattgccgaagagaacatagacccgcacggacgtccggcaacggatgaattcgaggaatggagcgaagaggtctccgaacggacagataccggatacaaggaccagaaaataaaatccgccaaggaacgggagaaacgtatccgggagatggatgaaattataaagaaggaccttaaggaataaattgacagccaccacagatagcacagattctcacagattagtctcttatacttgatttcagagcttccaatctgtgagaatccgtgtaatctgtggtgaccttttattatttgtatccgccagccttggctatgcgtttcgggatttccgtgttgtccatcttacccacgaacagcttggaacctgcacctactgcgaataccggcacatatccggctgtatggccaccgctggtccagcctaccatggcaatctggctcatcaccttcttggcggcaacggccaggggctcagtcttggcataaagactttcctcaaacactacatgcttgttcacaaatgattcttcgtaagcatcacgcagcatcttctcctgctcccagcttaccggcagttctttccagaaacccatcttttctgccaggaattccttcatttccggccagttgataaccttgcgcatcttgcgtaagtccgtgatggaacgtgaaaggatatcctgagactgcttctgcttggcaagggctttcagttgaagctcgtacttaccggtacccagccccagaccgccggtttcatggtcggcagttaccacaatcagcgtttctttgggatgcttcttatagaactcgtaagccaccttgatggcgttgtccatatccaccacttcctcaaagactgtggcggggtcgtttccgtggcaggcccagtcaatctttccaccttcaaccatcaggaagaaacccttgttactgcctttggtcaggaaagagatggcactctcggtaatttcggccagtgtcaggtcgccttcctggcggtcgatggcatagggcaggcaagaaggctctgccccttctttctggataagaatcatcttgtccgcctggacagacttcgacttatattcgtcaaggcctcttgcaacggtataaccggcttcttcaaagatagggaagatgctcggagcctctttcttgtcgacagtggtagtcggtttcaagaaaccaccgcctgcatagaagtcgaaaccggctttcggcaggtcgagggctatctcgtaatacatgccacggtccggctgatgggcatagaatgcggcgggagtagcatggtccacgctgacgctggtagttaccccaactttcttaccggactttttagctctctcggccacactctggagcacactcttattatcgtccataccgatagcgccgttgtaagtcttaacaccggtagccaaggctgttccagcagcagaagagtcagtcacagagttggtagcagagaaggtagtcgccatgctggcaaccgggaaagaagtgaacagcaaaggctttacaccgatgcgcccttcttgttcggccagatacatctccgtaccgttcacctggttcacacccattccatcaccgatgaaataaaacacgtacttcgcctgctgggcataggccatgccgctggtcagcagtacaaagaacaacacatacattaatcgtttcataagcagttcttatttaaagttattcggaaaattgcctttattgtttttaaccgagtaacaaagatagcaattttaaaggattcggaaaacatttcgcccctacaaatacattacatatttgcaggggcgaaaccacatccggactccgggaagccggaaccgggagatattacagcgatattacttcttcagaatatccatcgtgtccgaagcaatcatcagctcctcgtcagtggggattaccactaccttcacctgagaatcttcggtagaaataaccatttcttcaccacgtactttgttcttctcagcatccagctttatacccatgaattccaggccttcgcatgcaccccagcgggcacttgcctgattctcaccgacaccaccggtaaatactacgatatccacaccacccaaagcagcggcataggcaccgatatatttcttgatacggtagaagtacatttcttcagccaggacagccttcggattgccggcagctacggcattttccaggtcgcgcatgtcactggattcaccgaagatacccagcacaccactcttcttgttcaggaggttggatataccgtttacatccagaccttccttttccataatgaaggaaacagcaccggcatcgatatcaccgctgcgggtacccatcatcagcccctcaagcggagtcaggcccatgctggtatccacgcacttgccgtccttaatggcagtaatggaaccgccgttaccgatgtggcaagtgataatcttctttcctgccggctctacacccaggaattcgcagacgcgctgtgatacataacgatgggatgtcccgtggaaaccgtaacggcgtacaccatacttttcataaagctcataaggcacggcatataaataggcatgcttcggcatggtctggtggaaagccgtatcaaatacaccaatctgcggaacatccggcagaatagcagatattgcatttacacccttcaggttagcaggattgtggagcggagccaggtcgttgcaggcagtgaaggcggcaagcacttccggcgtcagtcgtacagactcgctgaacttttcgcctccatgcaccatacggtggcctacggcattgatttcgtccaaagacttgatggctccatattcagggtttgtcaaggtgttcagaataaattccacacctacagtatgttcgggaatattcttttcaagaatcttcttctcaccgctgggcaaggtgaacttcaggaaagagtctttcaaaccaattttttcaataccaccctgggcgataacttccttccggtccatatcaaacaatttgtacttgatggacgagctaccgcagttcaatactaagattttcatattatatatcagatttagaagttattcagcgttctttttggctgcaatagcctgatttgcagtaatggcaatcatgcgataaacgtcctcgatggagcaaccgcgtgaaaggtcgttcaccggacgggcaataccttgcaggataggacctacagcatcggcatgtcccagacgttgtaccagcttataggaaatattacccacctcaagactgggaacaaccagtacattggcatgtccggcaatggaagaacccggagccttgcttgcacctacttccggcaccaaagcagcatcggcctgcaactcaccatcgatggcaatgtcgggagccatttccttggcaatcttcaatgcctcaaccactttatccaccacttcgtgcttggcagagcccttggtagagaagctcagcatggcaactttcggatcgagaccggcaactgcctgagctgtacgtgccgtacatacggcaatctgtgccaattgttctgcatcgggcaccggagtcacagccacgtcacccatcaccaggatgccgttctttccatattcaggagcatgcgtcagcagcagcatggcacccgaaacgcaagtgatgcccggagcagtcttgataatctgcaaagcaggacgaagtacattgcccgtagtgttgcgtgcacctgccaactggccgtcagcatctccattctttataatcagacagcctaaataaagcgggtcgacaaccagcttgcgagcctcttcgatggtcatgcctttcttcttacgaagttcgcaaagcaactgggcatattcttctttcttaggatggtcttccgggtcgataatggtagccttattgatgttccccaatccccactctttggcacaagcctctatctcagcaggttttccaaggataatcaagtcggccaccccatcagtcaatatctgattggcagctttcaatgtacgttcttccgtaccctcgggaagaacaattcgttggcggtttgctttggcgcgctcaacaatttcattaattaatctttgcatgatattttaattgtctattaagaatcggcagtatgtgttattcacgccgcaaaagtacacaattttgcaatatctacattgcaaatgtcggtctttttactgttcagtccataattattatattatttaacattagctgttccccgcattcgtgtgtacgcgcacgtacctctctgcaacaaacaattacccgtccggcaggaataacctacccgactctgcaaacgacatgaaaaaaatcaggttataacgataacaagcaatacatagaatacctacctttgcagcgttttcaacatataacaataggtattataatagtatgattcgtcaatgcgccatccttttcggatgcttagctttgggtgaactgattgttttccttacaggtatcaagttgccttccagcatcatcggtatgttgctgctcaccctattcttgaaattgggttggattaaactgcactgggtgcagggtatgtccgacttcctggttgccaacctgggctttttctttgtaccgcccggtgtagccctcatgctttacttcgatgtcatcgcctccgagttctggccgatagtaaccgcttccataatcagcaccctgctggtgattgtagtcaccggatgggttcaccaactaacacgtaaaatcaaatgaactttttagaaaacgaatttttcctattggctgtcaccttcgggattttctttctagccaaactcctgcagaaaaagaccggcatcatgttgctgaaccccatcctgctgacaatcgccatcctcattgtcttcctgaagatgacacatatcagttatgagacctacaatgaaggaggacatctgatagaattctggctaaagcccgctgttgtagctctgggcgtccccctatacctccaattggaaacgattaagaaacaactgctccccatcatgctgtcacaacttgccggctgcattgtgggagttatctctgtcgtgctgatagctaaattgatgggggcttccgacgagataatctactccctggcacccaagtcggtcactacgccgatagccatggaagtaaccaagtcgctgggcggcattccctcacttaccgccgccgtagtggtctgcgtaggcttactgggaggaatactgggcttcaagaccatgaaactgacccacatcggcagtcctatggcacaaggcctttccttgggagccgccgcccacgcggtaggaacttccactgccatggacatcagccgcaaatacggcgcattcgccagcctcggcctgaccctgaacggtatcttcacagcattgctgaccccaactatcctgcgattattagggctactctaacaaaatcttcttatttttgttatctataatcataaccaactaaaaacaacgtatgatttcatttaaagatatcgaattacaagacaaaaaactgattacctcctatacacagaacagtccgcgacggaattgcgacctctctttctccaacctatgcagctggcgttttctatacaatacaaagtttgccatcatggacggcttcctcctactgaaattctgggcaaacgacgaactggtgtacatgatgccgataggcaacggagatttgacaaaagtactggacgcactggtcgaagacgcacaccgggaaggagaacctttctgcctgctgggaatatgttcgggcatgtgctcggaactggaagccttcatgcccggaaaattccagttcacagcagaccgggattatgccgattacctctatctgcgtacagagctcgctacgcttgccggaaagaaattccagtccaaacggaatcatgtcaacaaatttaaacgcacctataattacgaatatactcccatcactcccgaccgcatccaggaatgtctggacctggaagctgaatggtgtaaggccaacaactgcgaccagcatgaaggaacgggcaacgaacgtcgcgcactggtctacgccctccacaattttgaagaactgggactgaccggaggcatcctgcatgtagacggcaaaattgccgccttcactttcggaatgcccatcaaccaagataccttcggggtacatgtggaaaaggccgataccagcatagacggagcatacgcaatgattaactatgaatttgccaaccacatccccgaacaatatgtctacctcaaccgtgaagaggatttgggtattgaaggattgcgcaaggccaaactttcgtaccagcctgccattattctggaaaaatacgtggcatgtctgaaagacgagccggtggaagcgattaagtggtgagagtaaggattaaggattaaaagaataagggattgatgatgcgggaaaaggtaaagaagctatggaagctctgtttcaatgatagtgaggaatttactgaattgtattttcggctccgctacaacaatgatatcaatattgccatccaaagcggcgaagaagtgattgcctccctacaaatgttgccttatcctatgacgttcgaaggagaagatattcatacagcctatatatccggcgcttgcacacaccctgattaccgtaaccggggcgtaatgcacgagctgttatcacaagcctttgcacggatgctacacaataatgtcgccttatccaccctgataccggcagagccgtggctgttcgactactatgcccgcagtggttatgcacccgtattccgctatgccgaagagacttttatcgcttccggcataccggcagccgatacgggccttactttggaaatgtctgccgagtatagtgaaaaaagatatgaatatctcgaccggaaattgcgggagcgcccttgctgcattcagcatacgaaagaggattttcaggttatcattgccgatttacaactggggcagggcttcgtttgcactttgagcaatgggaaggaaatcacggctttggccattacctatccgatagggaaagccaactggcgcattggagaaatcgtgtcggatactcccgtaacaaacactttactgcttcaacatatctgccaaagcctgaatctcccgtccatccgggttctcactcctcccactaccgataaaagccaacttttgggcatggcacgcatcatcaatgccaaaaccatgctgcaactctatgctacggtccatccggaactggaactcagcattcatcttactgatgagcaagtcagtgccaataacggttactactacctcaacaatggtaaatgtatgaatagtgccaagcgtctgccaggcagccacttggcacttacaatcggtgaactcaccgaaaaaatatttgcaacatcaagcccatatatgagcttgatgttgaactagcattacaatccgctgaagtcgactccctcaaataccaacgaaggaatctgccatgagcggtttggttgagggtcattgcccacagcaaccaaggaattccacaaagcaaccatgttacccgtcacattcatttcgttgacaggctgtgtcagcttaccgtcttcaataaggaacccctctataccataagagaagtcaccggtactgctattgctgttaccgccattgaagcccgtaaccaaaatgccttgtttaacatctgccaccaacccgttcaggtctttatcacccggtaccagaatcaggcgtgaaggcgtactgatagtaggagccatattcatcttcttaccattgtaggtatcgatgaaataagttttcagcacccccttatcaaagacagtgcggggttcagtagccacaccctcattatcgaagtagcgcgaaccgtttgcaccgatgacatgcggctcgtcacgcaacgtgaagaggtccgaagccaccttcgcatccagcttgtccatcaggaaggaattcttttgttgcagagcactgccatacaatgcacttagcatcgggctgagcagatttcccacattcatagggtcaaccaccattgtatatttacccgactttgctttcttctgtcccagcttgcgcaatacgcgttccaatgccttggcaccgattcccgtcttcgtcaatttatcatagaacagagccgagtcgtaccagtaatcctgaggacgcgcttcaccttctcccttaatggatacactggctgagacagagaaccaggtactcttcgactcgccttcaaatccgttgcttatcaaacgataggaagaaccctcaccatcactataagaagaatcaaccgaaatgatacgctcatccttgcccaatacctcctctgcagcagcacgggcaatcgccactttatcatccgggttgacttcatagagtttcttatcaaaaagctgcaagtcaggcttgcctcctttatagtagcgtgcagggtcggccagcatacgcgactcatccaccgccagatagcgggtagactctataccattcgtgataagagtttccaattctttcttatccagccgattggtggaaaaagagccgaaacgtccgtccacataaagattcaatcccaaaccattctccgtagactgctgcaaacggtccattttgccgtcacgcagttcaaaagaagaattagaatttgtatatagcaccagtttggctgcctggcaaccgttcttcaaggcatattccattgcccattgtgccaatttcttattgtcgtctgtaatcatgtctttaattgatagttgataattaactttctcctcctacagtcagcttgctgactagtgccgatggcataccgcaggtaacgggacaagactgaccgtctttaccacaagtccaagtaccgttgtcaatcttatcgttatttgccaccatcgtgatgtcagccaatgctttcggaccattaccgatgatatttatatccttgacgggctgcgtcagcttgccatcctcaatcaagtaacccgacttcacaaagaaggtaaagtctccggcaccgatttgcacctggccattggtaaactggtcacaatagatacctttcttcacggtggagataatgtccgcttccttcatattgccggcttccatataagtggcacgcatacgggggataggagtattacggaaagtatcgcgacgtccgtttccagtaggagccaccccataatgcttggcactgatgcggtcgtgcagataactggtcaggataccttccttcacgatataggttttctgaccttccacaccctcatcgtcgaaattcacggctccacgattgaaggcgatggtaccgtcatccaccacgttgatatgctcatcgcacaccttctttcccaaaaggtcgcagaaaatggaagtacgtttacggttgaagtcagcctcaaaagcatgtcctatggcttcgtgcaacaagatacccgaaccgccagcccccatcacgacgggcatttcgccacctttgggtttcacagccttgaacaagatagcagtcttatccaccgcctcacgtgcaataatatccacgatgtcatccgtcatgaattcaaaacccttgcggtaagaacgaccagcataaccgttctccatctttccattctcttccatgatgcagactgccataaaagaaaccatcggacggtagtcgtagtagctcacgccctcggaattacagaacagcacgtgcgatgtactgtcagaaagagaagcctgcaccttacgtacacgattgtccaaagagaaaatcttttcgttcagcttttctaaataaggtatttttgccttgacactcacgtcctcccaaggttcagtgacggcatagcggcttttggcaattgtcttttccgtcagtcctacagattttccggccttgcccgaagaggcgatacgggcagcagtacgtgcagcacgcagcatttcttccatagttaccccttccacataagcataacccgtctggtcgcctgccaatacgcgtacgcccataccgaagtcaatgttagctccacagttgtttactttgccgtccatcagaaccacactgttgttgaatgtgtgttcaaaataaaggtcagcataatcgccgcctttttccagagcggcagccatcactttcttcaagtcagcctccgtcacaccgaagtgaaccattgccgaagctacggcagactgattatctgctcctcctaaagctccgcgtactgacgcaggcatagccaacgagggtactgccagcgaacctaacatcgccagacttcccgtccgcaagaaatttcgtctatccatccttttcagttattagttataagatattgttttttatatcatagttatatgacgtaaaaataggagattttgtcacacctcagctttcctttgttaacaaactttccaattcctctgcattcagacgcagatagaattgtcctttgtaagccactgaaatgcctccggtctcctccgatacaatgatggcatgcgcatcagacacctgggaaatccccatggcagcacgatgcctcagccccagttccttaggaatgtccagattatgggaaacaggcaggatacatcccgccgctttgatacgtttcttactgataaccatcgctccatcgtgcaacggactgttcttaaagaaaatattctcaatcagacgctggtttatatcggcattgataatctctcccgtacgcaccacatcatccaaaggcagattatgttcaatgacaatcagggcaccaaccttctgcttccccatactgatacatgccattaccaccggcatgatgtcgtcatgttccagcttctctttcttgttaccggtgaagaagcgcaccagcgcactggcatgctgatgcgagccgagtgtcagcaagaagcgccgtatctcgtcctgaaacaaaatgataagcgccagcacgcctacactgaccagcttgtcgaaaatagaaccgagcaatttcatctccagcacctgcgataccaccagccatatcaagataaacaccaggatacccgtaaacacatttatagaaccggaggctttcatcagcttatacgtatagtacagcaaaaaagccactaacagaatatctataaaatcttttattccaaattcaaaaaacacgatatcgaatgattaggggttagggactaggaattatttcgcatagcttgcacaatccgtacggtttccacggcttctttcacgtcgtgtacgcggagaatgtcagcacctttcagcagacagatggtatcgagcaccgtagtaccattcagcgcctcctgaggagtaatgtccaacaagcggtatatcatcgatttacgtgaaacacctaccaataaaggcaactcaaaaatacggaaatcttccagatgggacagcaattcataattatgctctattgtctttccaaagccgaaaccggggtccagaataatgtctttcacacctaagtcacgcaattgctgcaccttgcgtgcaaaatacaagagaacctcttccagaagattgtcgtaatgaggatgctgctgcatactttgcggagtgccttgcatgtgcatcataatataaggcacattcaacgccgcaacggtatggaacatatccgcatccatctcaccggccgcaatatcgttgatgatggcaaccccatactcctccacacacattcttgccacatccgccctgaaagtgtctaccgacaccacagcatccggctgtatctcaaaaagtattttcagccccatacgcagccgttccatctcctcccgggcagagacattgtcggcattgggacgggaagagtaagcgcctatatcaataatggccgctccctccgaaactatctgtttcacccggcgtactatttccgcctctgtctgtgtacggctaccggcataaaaggaatctggagtaacgttcagtatgcccatgacacggggttgagaaaggtcaagcagcgaaccgttgacatttatatatcgggcagttgtaatttccataggcagtctgttctatatagtacctgcaaatgtaaacaaaaaagtggtttcaaaatacataaactcataaaactgataagttttttgcttgtacccgggaagggagaggattaaaactatatctttgcacgatggtttaccacagattacacagattcacacagattgatttaattataaagtcatgaatataacagctatacatcagatattcctaacatgtaccagtgtcactactgacagccgtaactgcccccaaggttctttattcattgcactgaaaggcgagtcgttcaacggaaatgcctttgccgcccgggcgctggaaagcggaagtgcttatgccatagtagatgaagaagcctatgcccccgcaggcgatacacgatacatcgtggtggaaaacagcttgaaaaccttgcaacaacttgccaattaccaccgtcggcagatgcgtacacccatcatcggcattacgggtacaaacggaaagaccactaccaaggaactgatgtccaccgtactttcgcaaactcacaacgtgctctataccttgggaaatttgaacaatcacatcggtgttcccctcaccttactccgcctgcgccctgaacacgaacttgccgtagtggaaatgggcgccagccacccgggagacatcaaggagctggtagagatagccgaacctgactacggaatcattaccaacgtaggaaaagcccatctggagggattcggctcttttgaaggagtcatcaagaccaaaggagagatgtacgactatctgcggacgcggaaagaagctaccatcttcatccataacgacaacccctacttgaaaaagatagcctacggactccaccagattgcctacggcagcgaggacgagctgtacatcaacggacacgtcaccggcaattctccttacctcaccttcgagtggaaaacgggaaacgaaagcaaatatcacgaagtacaaacccaacttatcggtgaatataacttccccaatgctctggcagctgtcaccatcggacatttttttggtgtggaaccggagcaaatagataaagcactggccggatataccccacaaaacaaccgttcacaactgaaaaaaacagcggacaacacactgattatcgatgcctataatgccaatcccacaagcatgatggcttccatcagtaacttccggaacatgcaggccaaaaacaaaatgctgatattgggagatatgcgggaattgggtaaagacagtgccgacgagcaccagaagattgcagactatctggaagaatgcggattcaaggacgtagctcttgttgggaaattgtttgccgccacacgccactcttatcagagttatcccgatgtaaccgcactcatcgcagagctgcaaagagagaaaccttgtgggaaaacaattctgataaaagggtcgaacggcatcaagctaagttccgtagttgaatacttataatcctatttcatccttggccttaaaatgaaatagccgaccattgatgcaagcaccgctcccgtggtattggccgcaaaatccagccagtctccgccgcggtatgtcgtgcagtattcttgcagcaactccaccattccgctgaacaaaacgggacagacaaacgcccctgcccatgcatgccataaaggggcgttgtctctccggtgagcgcgaagaaactccagccacagcattcccgacatgccgaaatacatacagatatgcaccaccttgtctatattgggaatcttgcttatttctgtagaaggcggtttaaagaatgaaagataaatcaccgtcagaataataaaaagcgacaccggatatttcttaatataatatagcatataccaaataatcaacgaactgtgcgcaaaagtacagaacattttctatatttgcatgttttagatggtattaataacgaattgaaagaaaaatctacgttttatgacaaaaagtgacagagccaacttcggaagcaaattaggtgtcatacttgcctcggcaggctccgcagtcggtttaggtaacatctggcgtttcccgtttgagaccgggaatcacggaggtgcagcatttatccttgtatacctggtttgcgtgctcattctcggcatccccatcatgattgcagaattcctcatcggcaggcgctcgcgtgccaatacagcaagggcttatcaaaaattagcacccggcacgcattggcgctgggtaggacgtatgggcgtactggccggattccttattctgggatattactccgttgtggcaggatggacgcttgagtttatcggggaagcagccacaaacagttttgccgggaaatcggcagccgatttcatcgcatccttcaacagctttgtcagcaacccctggcgtccggtcatctggctggtgctgttcctgctggccacccatctcattattgtcaaaggagtggaaaaaggtattgaaaaatcagccaaaatcatgatgccgatgctgtttgtcctattgataatccttgccatctgctctatatctctgcccggagcaggagcaggtattgaattcctgctgaaaccggacttcagcaaagtggacggcaatgtgttccttggagctatgggccaggcattcttctccttgagcttggggatgggatgtctctgtacatatgcctcctatttccgcaatgatacgaacctgcccaaaacggcactcaacgtggccgccatcgacactatggtagctattttggcaggattcatcattttccctgccgccttctctgtgggtatcaaaccggatgcgggtcccagcctgctattcatcaccctaccgaatgtctttcagcaagcgttcggcaatattccctggctggcgatactgctgtctctgatgttctatatcctactggcattggcagcacttacttccaccatttccctgcacgaagtggtaaccgcctatctgcatgaagagttcaagttctcacgcagcaaagcagccagatatgtgacagcaggttgtattttcttaggagtattctgctcactgtctctcggtatcggcaagagctataccgtattcgggttaaacctattcgatttgttcgattttgtaacggccaagctaatgttaccgttaggcggtttgttcatttccatcttcataggctggtatctggacaagaaaatcgtatgggaagaagtcagcaacaacggcactctgaaagtatccgtctacaagctattgatattcatcctgaaatacattgctcctataggaattgcactgatttttatcaatgaactgggttttctgaaataggccatcatgcagaaccccttcaaagaattcctttatttctcccggggagaaaggcgcggaatactggttttgattaccggcatcattctcgtctttctctccgggtatatttatatataccaaagagaacaccaccccctctccgacgaagcaatccggcggcaggccactgccatggcagaatacgaatcgttcatcgcatccatacaagaaaaggaacaaaaatgggacaacagacttaattcttcctctccaaaacaaccgacaaccgtctccctggtccgtttcaatcccaatactgccgactccgttactttttgccgactgggactgcccggatggatggcgcggaacatactccactaccgtagtaaaggagggaagttccataaggcagaaaatttccggaaaatatatggaatgacagaaaaacaatatcagacactcctgccctatatccacatcactccggaagacacagagacaagaaccgtccagttgtacaactctccttcgagtaataatagcgctgctacttcccgaattgcaccggaaaaatatccggctggaatccttgtcgacctgaaccgcgccgacaccacagagctgaagaaaataccaggcatcggtagcggcattgcccgtctaatcatcggttaccggcaacgcttgggagggttctacgacatcacgcaactacaagaaatccatttggacaccagccaattgcagtcttggttttccatcgacacccgagccatccgcctcatcaacctgaaccatagtagcatagagaggctgcgcaaccatccttacatcaacttctaccaggcaaaggcctttgtagaataccgaaagaagaaaggcgaccttcatagcctgaaaccttttgcactttacgaggaattctccgataccgacttagagagaatcagccactacatctgctttgaataacatgccactctctcaacgaggcaaaccaccatatcgaacttggaaaaaccgcactgacaggctcagaccattttattgatttccccgtctatcagatgtatcgtccggtcggtgagctgcgccagtccttcatcatgggttacgataacaaacgtttgtccgaaacggttacgtaaatcaaaaaagagctggtgcagttcttccttattatgggtatccaaactgccggaaggttcatctgccagcaccactgccggatgattaatgagagcacgggccaccgccacacgctgcttctcacctcccgacaactcattcggtttgtgggaggcacgttcggcaagcctcatgaattcaagaatttccgtagctgcttccttggcttcctgctgtccttttccggcaataaaggccggtatcattacattctccaaagccgtaaactccggcagaagttggtggaactggaacacaaagccgatatgccggttgcggaatgcggaaagttccctctccctcatacggttgacttgtgtaccgtcaataaccaccgaaccgtcatccggcatgtccaacgtacccatgatttgcagcaaggtagttttacccgctccactagggcctacaatgctgacaatctcccctttctctatctccaggtcaataccccgtaacacttgcaggttaccgaaactcttggttatattctctaaatggatcactaggctatttacaatttgacaatttactatttactatttgatagttttctttcaagtgctattactatagtcttttaattacatattcggccaaatagcagccaaaaactgcaggcatgtagctcactgttccacaggtggacttcttgttcatctcgtcgtccgtcagcaaaacggcattcgggtcagcctgttcagtgctgaaaacaactggaagtttccgctttatgcccattttttgcagacgcttacgcacagccttgctcaatccacaatgataggtatcccatatatcggcaaagcgcacttgcgaaatgtcactctttgctcccgcccccatgctggacacaatcttgatatgccgcctcatggtttccactatcaagtgacattttggagcaagcgtatcaatggcatccaccacaaagtcataagccgcagcatccagcagttccggtatgttctcatctttcaggaatacgggcaacactctcaattccagagccggattaatgtccctaaaacgtgatgccaatatctccgccttcttctgccccagggtagaatgcagagccggcaactgacggtttatgttcgttggctgcacggtatcggcatcgacaatcgtcatccgccccactccggcacggcatagcatctcggccgcataagcacctacaccacccagtcctacgacaagtacatgcgccttgcatagccgttccatcttttcatctcccagcaggagttgtgttcgctgtttccaatcttccattttagcttttcttaaaccacttatagaaccatttgcctaccttctcgtaatgctgcgactcattgttgccacgcggatttgagaaggataccgcatcctgcggttcacccagttggtctggatacaacacaatcagactattgtttgcaaaatatttactgatttgtgccggcaacttctcgaaggagctgtcataggagatggagccccgacgagcgctgataatcactaacagatggtcaaagttcacttgtccggtcaatatcagtaaatccccccaatcgtccaggcgagaaaagtcagtcaatgtctgtccatatttggctttcaccagcccttgaagatgggcggtagtctcttcattggcataaaaatgcacccggcaacccaaagtactccccaaccgacagaaatgttccacccacttcaggaatcccgcctcatactcggctttcggaggtaccgccacaatcacccgcctgattgtgttaataggcatcaagaatttggaaaccatcacctcgcgatgcaagcctttcagcagattctccgtcagcataccgaagaatgaatccacaatattgaccttacggtgcagacctataatgacatccgttgccgcatattcttttgccgtatggataatgcccgaagcgatattcaagtcgtaacgtgtgatttgcctcaacggcacatctgccgaggccgttatcatagcagccttttccagatagcgtttcccacgcaattcggcactttcagaactgctatcgtcgttgatgacattcagtgccaacagattatcccgttgcttcgggtcgcgtatcaccaaagaaagatttatcaggtcttcaatcgtatcggggttggctatcggaatcaatatcttctccgcttccacggagcggttttcttccagatgcgcctcctccatggcaatcttccgtgcggcacgctccgtaatgaacgaactcacaatgcaagttacaagaatcagcaggacggtaccattcaaaacatcatcgttcagcaagcgttccccattgggcagaatgatgttgtaccccaccaacacagccgccagcgttgccgctgcttgtgcattgctcaatccgtacatcagctcccgttcaatccctcccattttatatattttctgcgtcagccagcaggcaatccatttacctgccaatgccaccacaatcattacagccgctactttcagggcatcgccatgaccgaaaatcacatgcacatcaatcagcatacccacacctatcaggaaatagggaataaacaaggcgttgcccacaaactccagatggttcatcagcggagagacatgcggaatcagccggttcaaaaccaaacctgcaaggaaagcacccaggataccttccatccccacaaactccatcaatccggctccgaggaaaaccatggcaagcacgaatatgaactgcatcacgttgtcatcgtacctccggaagaaccaacgacctatgcgtggaaacagatatacaatcaaaatacccaggaagataacctttataacaagccatacccaaaagaagccgtccgactcctccttgaacataccacccacaacggccagaaccagcaaagtgagtgtatccgtaaccgccgtcccccccactgcaatactcacactgcgatgccgcgacacaccgtaacgaatcacgatgggataggccaccagcgtatgtgacgcatacatacttgccagtaggacagaggtcagcaccccgtacttcaacaaagctatattcgttaccaagcctatgcctatgggcacaataaaagccaagagccccagaacaagcgctttgccccggttctgtttgaagtctcccatattcatttccagaccggcaaggaacatgatgtaatacaagcctactttgccgaaaagctcaaaactgctgtcacgcaccaaaatattgaaaccatgctccccaatgacaagccccgccagtatcattccgataatgtgcggaatacgaagcttattcaacaatataggagcaaacaatataatgaggagtacaaggaggaatatccatgtagggtcggtgatgggaagtttcaagctgaagtcaaaccaatccataggctataagttttaggttttgaatgcaaaataacgaaaaacttttcactttatgcggtgttatacagcattttgttataaatttgcgaccaattctatctttttagagatagtatttcacttttttataaacttaatttaaaacaaaagaaaaatgaaagtagctattgttggagcaagcggagccgtgggacaagagttcctgcgagtgctcgatgaaagaaatttcccgttggacgagttagtattgttcggttctaaacgcagtgccggaaccaaatataccttccgcggtaaacagatcgaggtgaaactcttgcaacacaatgatgactttaaaggggttgatatcgctttcacttccgcaggcgcaggcacctccaaagaatttgccgaaaccattaccaagtacggagcagtgatgattgacaattccagcgcttttcgtatggacgacaatgtacctttggtagtgcccgaagtgaatgccgccgacgccaaagaacgtcctctcggtatcatcgccaaccccaactgtactactatccaaatggtagtggcactgaaagccatcgaacagctttcccatataaagaccgtacacgtttctacctatcaggctgccagtggtgccggcgccgctgccatggatgagttatacgagcagtaccgccaggtattggcaggcgaacccgtaaccgttgaaaaattcgcttaccagctggcattcaacctcattccgcaaatcgacgtattcaccgaaaacggctataccaaagaggagatgaagatgttcaacgagacccgtaagattatgcactctgacgtaaaggtcagtgctacttgcgtacgtgttcccgctctccgctcccactccgaaagtatctgggtagagaccgagcgccccgtctccatagaagaagcccgcgaagcatttgccaacggcgaaggcttggttctgatggacaatccggcagaaaaggaataccccatgccgttgttcctcgccggcaaagacccggtttacgtaggccgtatccgcaaggacctcagcaacgaaaacggattgacgttctggattgtgggcgaccagattaagaaaggcgctgcactgaatgcggtgcagattgcagaatacctgattaaggaaaaagcattctaaaaagggtgagagactgacttcaaaatgaagtcagtctctcaccctttttagaacttgcatttttatcaccttttataagggtaagttcgctaattcatatgaacaaattttgctataagtaattcaaaaaaaacattttaagtcaaaatactatttgttattcatatatttcatgacaaaatcaaaaagacaataacacctcacttaggaacaatatcaactatatctttacgattacgattccaagagaagctaccatcagaacgttccaaatacaaattagtatcaagatacattccattataactacctccccatccccagttcatataaaaataagtacggatatcaaaatcagttgtataagaatctgaaataagaaaaacgaatgtccctccaggatggaactcctctggcattgttaatagttcatattctgtataatgatcaatgtcatgatatccacatgcaacccacgcatgccccaccttaccatcatctgtaaagccttgcataattaccggctgcttttttctcaagttgccgatagttcttgctgccgaatgatttacaacttgagctgtcgtcgaatagccatatttggacactaatgcatttcgcacatccgataatgacgcactagtcccatctaatgcataatctgcgttaattgcatctgcaacatctctgataaatgcagcagtgacagaagaggcataactatttggcattgaattccaattaaaaaaagttggatactcattatatttcattacttgagccattgctattgttgcacaaccagcaggtggatattgaccacttatttgaggtaatgcaacattaaaaccagattcttgtgtccaagttgttgataatatatttcccattttttcttcataacctttttgtttccagcgcaagtaagcatgttgattataatcatattcaatataagtcattccttccgcaacagcacgaaattgctcgtatatactttccggcaaataatccctagcaccagcaaacggaatatatccatagccttcctttttccattcacggcaacaatctgctatgtaattttcaaactcagctatattagaacgcgtatataccttatctttcatagcaggtatatattcttcccacattgctctatattgaaaagtactatcaatcggcattttatctcgttcctcaataacattcttcatatctcccagccaatcagaaagtccatccggcattctattattagcattaaaactacctctctcagcataagccaatataggttggaagtttttggtagcactaacaagtaaaaagccttgttcattatcataattgataatatacatacttggcttattaacttctccctcaatagtaattatttccttgacagatttactaacgcgagtccgaggagcatcctttacagtaaaaagttcagcaacatttcttgcatcttccacagatacagaagtctcatacattttcgtatcaaagtttttttcatctatcgtcgcatcaattgcgtcaatcacattgtcctgacaagaaaaaacaactcctagcaataaaatccacaaaagcttcgttaatgttctcataaatattaatttaagtttataacaactcaactatttgtaatctttcaaatattaaggcaagtataccgccattatagattcaactaaataaacatgcatcacaatgggtagcaattaatcagctcccattgtgatgcatcttattaccagcctgggttctgctctaacttaatagaagaatctcccagttgttcactcttactgttatacaaggatatctgtcctgtcgggataggataaagataatctttttctccataagtacgcaataatgaagaaacctggataggtttgatataacctgaattaccttcacgatccaaaagaatgtctttcaaatcatcaatggtatatgacgttccgttagcttggttatattctttcaaataagcttccttatccaaccatgcccccaagtttaactttttgttaatcttcatatccgcataatgcaattttccccaacggcgaatatcatcgaagcgaatgccttcatacaccaattcgatgcgtctttcacgacgtacttcccaaaggataggcgaaacttcatagtcaccaaccacttcggagtttcctaaatcacgatctgggtcattgataatcaccccattcacactaaagttcttaccacttaatgtaacagcaggcatgtttacagaagccctcttacgaatttcattaattgtaatatccaaatctttttgtgacaaggtataagctcccatatcatttaattcagcagcagcctccaaataattcaatagcacctcattcagtttcataataggtgcgtcggttgtattagtattactctgtcctgcagcagtattgaataaatcttcgttaacaaaacgagtaccaaaataacctccaataccatataccgcacctgcaataccatttaaacgtacaccttcaagatcaatattggctgccaaacgtgggtcgcggtcagtcatttcatccttgaaaaccttatcacctttaaatactgtatttccgtcttgatgaataggcaacccattagttgtcaaatagctatcaaccaaatccttagaaggtccattgcccaatgtttgttctgattgccatgacatttcagcatgagtaagaataccttccacataagaacgatataatatcatttcaggattaccagccaagtccagtgaaatagtcaatgctttgtaatcactagaaattttatatttttgcgcagacattactctattcgcggcagtctttgcagcctctaaatacttctttgccaattctgtatttccctcacgatacttctgccaggttccctcaaataacataatacgagactcaaaagcattcaccacatgccgatttacacaaagcccatctgttccatcagcctcttttacattgtctgcagcaaattccaagtcttccaacactttatccattacaaaatctctggaatctctccctttataaagagctttttcatccgtattatctacaacatggtcataatatggaacatcaccaaacatccttaccaaacgagcatattccataccacggaagaagcgtgctacgcctatccaatggttcttaacgctctcaggcaaggtggaatttacaagtccgtcacacacaaggttaatacggcgaacgtttgcaaaagaccagtcggcactagttgcaggggctgtatttgtaaagaaagtcgcttctttctgcgccaaatcatctacccaattagcaacattagttccgtcgaaaaaatccgatttcacccaaccgctttgataaccggtaaaataaatatcataccatccatatatcgtagagcgaatattattctcactattatagaaatctgcactattctctatctgatccataggcggacgatccagaaagtccgagcaggaagagagaccagcagccaatgctaaaactgcaaatatttttgttttcataattttattagaatgtaagttgaacaccaaatgaaatagatctcataaacggataactcttaccaaatttgtactcaccgttagaagcagcagctttctctgtcgtttcagggtcaaccggaatattagtgtgatcaaactcgaacaagttttccgcactaacataaatacgaccacttgtaaaagttattactttcatccatttttccggaacagtataacctaatgtaatattcttacaacgcaaatatgacatgttctgcaaataacgagtttgacgcaggaaattctgtccgttgtttatccaagagtgagaagtcggtgtaggatagaatgcatctgtattttcaggagtccaataatccatctgatgctctaaccacccttcgcctggcataaatcccggaataccagtttgcccaacagcccatacatctcttgagccaataccttggaagaatgtgctgaagtcaaaatccttatatgtcaatgctacagagaaaccgtattcaaagtttggtaaagtattaccaatgcgtttcaagtcaccatgatcctccaaagtctgttcaccataagtaatctcaccattaccgtccaaatctttatattttacatcacccggaccatatttgaatgcaccggtttcatacaatgcctgcgaaggtactttattggtatcaataaaccattttccatctgcatcttgatagcagtcttcatattggaacagacgatctgtctcatatccccagatttcacctataatcttgccttcgtagttaccataaatattcttattcgggttgttatacttcgtaatcttttcgcgaatcttagataaagttgcacgtgctgttaaaccaagcccacaagcaaatcttttattataatctattgacaactcaaagccgcgtccttgtaattccccggaattaaccttaggcattgttgtgcttccgaaagtagaaggcaatgtttcacctggtgaatgcatatcagaagtagtacgctgataccagtcaaaactgacaccaagttcattattgaaaaaacgggcatcaaaacccagatcaatagtagtaacacgttcccaagtcaatgacggagaaacaacggaaggaataccaatataaggtacttgcttaccatcaatcacccagcccgaggacttatttacagacattacagaaaggaaagagttggcagctacatcctgattaccaattgtaccccaagaaccgcgtactttaaaatcagaaagaactggttttgcccatttcataaaagtttcttcacttaaacgccatccagcagaaacagaaggaaacagagcccattgatctcccgagggaaatttagaagaaccatcatagcgtgcattcacctcaagaagatatttacccatataatcgtagttaatacgtccgaagaaaccggctgccgcaaaatcattatgataggtagtaccatctacatactgatcaccaatggccagattaatttccggtttatcaaagttcactaatgtccgtcggtctgaactatgacccagtttttcacgggtttcagcatccataccgaccatcactttcaagttgtgcttttgtacaaaagatttttcataagtggcataagctttgaaagtattggacattgtatatcgactacgttcaactacacgattatgggtagcaccataaaaacttgaattataagtcaaaggattactactgttgaacatatcccaaccaccaacttcaccaccgttacgcttctgataatcattaagtagagcgaaagtgtagtcaaaattaatggccaaatccttaatcggattaatagtagttcctaaattaacacgagtaaagttattagttaaactttcacgattagcctgtgctatctcagtcatagctgaacggaaaggaatcccctggtaatcagcataaggatagaaagaaggccaacgcaacaaatagtaccaaacgtctgtataaccacttgtgtattgatatggttctgattttgtggaacgagagaacataacatttgctctcacagaccaccagtcacgaatctgtgtattgacattggcattgaaattataacggtcatactcatctgtattaacctttaaaataccttgttgattcaaatagcctaaactaatattataggttgtcttatcactaccgccgctgacagaaagattatgcttctgttggggagtccaatctttcataaacatatctaacggatcaaactgacgataaaaataatacttgccaccacgttcttcaaaatctctacctaattgcatttcgcctaattccgattgtgacattccaccataagtgttgtaccattccttcatcttctgaactgcaatttcatcgacattatatcctatcgaacttacagtagaagcgccgcttctattggcagccagtaacatagcttgtgctccctcataggttttagcgacttgtggcatcacagtcggagtactccaagagaagttattagagtaggtaacacgcggtttatcattttttttaccagtctttgtcgtaatcaagactaccccccaggcagcacgtgtaccataaatagaagcagatgcagcatctttcaagacagagatgctggcaatatcgtccggattcaccaaacttaaactgggaacttccacattatccaccaaaatcagtggacttgtcccttccgtagcactcaaagaaccagtagcaccacgcaacttgatattagaatcaacgccaatacctcctacattagtcgtgatactcaaaccaggagttataccttgcaaagcttttgcaatatctgttaccggacggcttgcaatcgcctcttggacatctacattagccaccgcaccggtcaggttcacctttttctgtgcaccataacctactacgacaacttcatccaacaattccgtatcatctttcaaaacaaccttcattaccgaagttgccttaacttcttgagtagtatatcccacaaatgatacttgcagaatagcaccgggctttacatttaatttggaaactccatccaaatccgtaatgccaccattggtcgtacctttctcaatgacattggcaccaataataggttcaccttttgtatctacaactgtgacagttacagagatagattgcatctgttcttgtactccttgtgagtcgttggatgctgtttgggcagccatcacgttgccactgcctaaaaacagagcacagattgccaccgccgtaaagaacttaccattggcaagtcctcgttttttgcgatcttcattcataagtgattgatgattttgttaattaaaccagtttttcaaaattagggtaagggaatcatatagttcggattagtcagactatttccgaaggcttctttaatttctcataggcgttttctttatttaaaggttcacatttttatattatctctcttttttctatttatttaccaagtccagacggaacttagttatatattatacaaggttaaaatcttgttaattacttaactctattggttgttttaagagataaaaaactcgttattaacaaaggtgagaaatgattcattcatttcgtcctaacaaagatacattattatttaatatcaagaacattcctttgcatttatttaactttatatttatacatttgcaaaaaggaggttatacaccttattatataaagaatttaaggttcttctatatttaaagaatggaattcaatcaggccattcattggtgtttcttcaatgatttccagttcgatgccaaattcacgggcaacttcccgcaaaatggtcgcgtagctgtaagccaatgaacccacaaaacgaataggataatttttgtagtcatattggcagacattacgagtaaagaaatttctcagattaccggtaatcagctcaaatacatagtcatcattggtataatcagccaaaaaataagatatagtagacaaaaagcgattggggaacgggcggttatacacagattccataacctcattcggacttatacggaacttctcaaagaaatccgccgttacatctttaggagccaaacctttcagtacatcagacaagaacattttgcccaatacagcaccactaccctcatcccccaggatgtaacctcctgcccggacattctttacaacgattttcccatcataaaaacatgagtttgagccggttcccaaaatacaagcaatgccggcctcgcatttgaacaagccacgtgcagctgccagcaaatcactctctacctgaattggagttttgaattgtgctaccaatgaagctcccaatacatttttcttttcataagaagtacatccggcaccataataatagacttgttccaatttccttttgaaaaaatgctcgggtaatcctaaccgcacacttcggctaatctctcttctcgtttgaaagaaaggatttaagccctctgtgaaggctcgctgtatcagacgattatcttcaaccagcgcccattctgttctcgtagaaccattttctgcaattagtttcataggtagttagttttagaattgaatacaaatatatagctttttttaatctttccaaggctatttcaagaaaaaatcattttactggccatacatctcccttttgctcatatcctcaatcatccaacaaagtattcccacttttccaacgcaaccgcgttttagtcaaaacaagacgataacagactaataataagatactatctgactgaattccaagttccgtctggacttggcaaacaaatagaaaaacaggagataatataaagttataaacctttaaaaagagaaaatgcctatggaaaaagaaacaatcctgcaagttgaatagtctcactattcggtccttattacccttaccctaaatttaagaagtatttaattaacaacaaatcatcaatcatttatgaatgaagatcacaaaaaacgaggactaacacatagcaaactcctcacagcagtggcaatcagctcactgttattaagcagcggcaacgtgatggctgcacaagccaatcctgataattcgcttggcgtaacagaacaattacaagctatcactatcagcggtttagttgtcgatgcagccggcgaaccgattatcggtgccagcgtagtagaaaaagggactaccaacggcggaattaccgacttagacggtaagtttacattgaccataacaccgggagcaacactaaaaatatcatttgtgggctatcagacacaagaagtgaaggcagccaaaacgatgagaataactctgaaagaagataccgagatgctggatgaagtagtagtagtaggctacggtgtacaaaagaaggctaacttgacaggagcagtttctacagtggacttaaacaagacaatggcaggtcgtccacaacaagatgtagccaaagcattgcaaggggctgttccgggactaagcattctcaccacaagtggtgccatcgacgagacagcctccatgcgtatacgtggtttggggacattgagtaatggagaagtcagcaatccactcattgtagtggacggcgttccgatggatgacatttctttcctcgatacgcaagacatcgaaaatatttccgtactgaaggacgcttccgcttcctccatttatggaacgcgcgccgctttcggtgtgattctaatcaataccaagagcgcaaagcctagcgaaaaggttaccatcaattacagcaacaattttgcatgggatcaagctacttacctgccggactatcccgatgtacccacacaattaaagatgggtatcgaagccagtatgaacggtggtgccggtatgcctgaattgttcggtatgtatttcgacaaattgttaccttacgccgaaaagtggcagcaacagaacggcggcaagaccggctaccgtcctatgaacctctaccaaagcgatagtaacgtgggtgactatatcgtattggacggcactcctttttattatgctgactgggatgtacaggacatctacttcaacaaagctgctccttccatgagccacaatgtttctatacaaggaacatctggtaagaccaattactacctatctttcggctacaacgaaaagcaaggacagatgaagattcacccggacgaactaaaaaagtacaatgcctcagtcaatgtcaccactaatgtttacgactggctacaggtgggtgcacgcatcaactatagtcgtaagaactataaacgcccggacacatgggccaacacctaccaatatttgtggcgttggggttcttatttcattccttcgggcacaatcgacggctatgacacacgcgtcatggccatgcagaagcaagctgccgatcgtgaagtgacaacagacctgacccgtatgaacaccttcttgaaagctgaaatcgttaaaggactgacccttaatgcagactttacatatgccattcagaatatgaacagcggttcgcaggacaactccgtttacggcatcaattggagcgggaaaccggtaccctcttacatcgtcactaaaggcaatagcggcatctggagagacttttccaaacagaacacatggacggccaacgcatacgtaaactataccaaaacatttgccaaaaaacacaacctgaatgtaatggcaggtgtcaacgcagaagaagaggaatacaaatatctgtatggtacccgcaatgtgatgtacgatcaagagggataccccgaactgaatatggctggcaaggatggacaagatttgagttggaatcatacatcccgcgcttctgccggttatttcggccgtatcaattatgactacaaaggcatttatttattggaactgaacggacgttacgacggttcttcccgtttcccccataccgaccagtgggccttcttcccttctgcatccatcggctaccgcttctccgaagaagcctacttcgccccactgaaacatattgtcagcaatggtaagttgcgtgcttcttttggcgaaatcggcaacgaggctgtgggcgactacatgttcgaacaattaataagccaacggttgaacaataaaagtaccggctatatctattggattgaaaacaataatgccaacgctaatctcctgaccatgtataacatgccggatttggtatcaagtactttgacctgggagcgtatccgcaccctcaatataggtcttgacctgggtctcttgaatgacgaactgactataggtttcgactggttccaacgtgagaatcgtgacatgctggcaccggcacaagtattgccgaacactctgggtgcttctgctccttatgaaaatgccggtaccttacgtacacgtggatgggagttgaacttgaactggcgccataccttcggcgacttcgacgtatatgccaacttcaacatcggtgactccaagactaaagtaacaaagtgggacaatgattccaaactgctcagcacctattacaccggtaaaacctacggtgacattttcggttttgaaaccgaccgttacttcgaggaaaaagacttcaccagccaaaatgcagacggctcatggaattatgcaaacggcattgcaagccaggcaggactggaatccggtaatttccattacggcccgggagacgtcaagttcaaggatttagacggcaatggcaagattgacggtggaaaaggcacagcagacgaccacggcgatttgaaagtcatcggaaactctatgccacgctacgaatacagcttccatttaggcggagcgtggaaaggtatcgaccttgacctctacttccaaggtgtaggcaaacgtgaggactggacgacttcttccctaaaccttcccgccatggtacatgccgacgtagccatctattcccaccaaacaagctataacaaagtgctttggaattcagactataccgccattaccggttatgaggtaaatcaaggcaaccgttatccacgtctttatcgtggtacaaataatagtggaggtaccgtatccggtatagctaacggctgcaacaactactatccccaatcccgctatttgacagacatgtcctatcttcgtctgaagaacgtaactgtgggatatacccttccgaaagagtggacacgcaaagcctacattgagaaagcacgtatctacttcagtggcagcaacctctttctgctccacaaagggaatgaccttccagtcgaccccgaaatcagtacaggcaatggacttacagctggtggatggggacgtatagctcctattacacgcacattctcatttggagtccaggtaacattataacaacctcaaaaacttaagaacaatgaagaaattatttatatatggggtcacagcgctggcgatgttaaccggttgcaacgatttgctggacaaatcccccttggataccttcacgaatactccggcatactggagcaacaccgataatttggataatcagtgcaatactttttataacaactttaccggctttggcaacggagccagtggaggatggttctacttcaaaacaataagcgatgaccaggtagatgcagaaagccataactggacttacactaacgtggtcgcatcttccacaaactggtcagcccctttcacagaaatccgacgcgccaactatatcattgccggtgtacagtcttcctctcttgatgaagcaacaaaggcccactatgaaggtcttgcacgcatgaaccgtgcgtgggaatactatcagttggtccgtatgtacggcgatgttcaatggatagacaaagttatcgacccagccgacaacgaagccctctacggaccacgcaccgaccgggatgaagtgatggaccatgtgctggcagacatcaattatgcgtgcgaacacattaccgcaaacagcaatcggcaacgtttcagcaccgacatggcatatgccatgaaagcagacatcaccttatatgaaggtacatactgcaaatatcgcactcaagcagagaatggcaaagccgctgatgagagccgcgccaacaaatacttgcaagaatgtgtatcagcctgcgaatatcttatggccaaaaactactctctaagtaacagttacaaagccaactataattctgtcagcctggcaagcaatccggaaatgattttctacaagccttatgcacaaagttcgttaaggcactccaccattgactacacaatcaatacaagtggtacgcacggcatttcaaaggacgcattcgacagtttccttttccttgatggaaaaccgttggcaacaacctcgaaaaacaaggacgatgcagccgtattggatgcagacaaaaattactctataagagaggttttggccgtacgcgacaagcgcctgtccgaaattcttgacccggtactttctttcagaggccacgcctacagccgtgccggtgtagcagccttcaccacatcgaccggttatggcatcgccaagtatgataaccccgaagaattgagtgtaagcgaccgaaacaacatcggctaccaatacaccgactgcccgctctattggatttcagttatttatctgaactttgcagaagccaaagccgaaatgggttctctcacacaagacgatctcaacaactccataaacaagcttcaggctcgtgccggcctgccggctatgacaactactccagatgccgatcctgccaataatatgggagtaagcaatctgatttgggagatacgccgctgtcgccgttgcgaactgattatggataactggtaccgatattgggatttaatccgttggcaccagctcgacaaattggattcaaccaagtacccgaacaccatgttgggcgccaacgtaagcaatgtgcctgactgtgaagaagcgaccaagaacggatatatagatgcctccgatgcacaaatccgtacttatgaagccaaacattatttctacccgattccaactacacagttgaccctgaataaaaacatgaagcagaatccgggttggtaatcaactaaaaacagcatatcgcgctgtacctcgtttggatttaattaaagcgttcatacattccatgtatctaaatacaaatgtatggacgcttttgttattccctttaaaaggtgtatagaaacacgaatagcaccttctaaaaggaaccataaatcaatatcatatactttcccttcgttcataacatactaacaagaaacatatcatgaaaaagaagaacatatttttcgtactactaatctgcttcatcaatagtagttgcaacaaagaagaacaaacagacgagttacaagataaggatttctattctgatgtcacaacacgtgcttcctacataagcggtactattacgggcgaaatgaacccctatgttagtgatggttactacacttatgatttaagtattcctatacaaaaacaatctgtaggtataagaatttcagcagtcggtggagaagcacgattcaaaacaaactaccaagaacgattcgagagtacatgggtaacccaaattccagcaggaaaaaaccattttccaataaatgtattatggactaaagcaggtagtaattctaccctgatggtacgtcctgaaaaaagtacaatcgaacttaccgcagatctaagaaacatcaatgtcaaaatgaaacctatgccaatcaatgccccttcaacatttgaattgggagatacgataacactttggtgcaattattccataaacaaagatacgggcataaagtggacttacgataaaaatctattcgctgaagtctctcaaagtgcatctgtcacacaaagtagattccaaataaatttgaaatcaaagcaagccttcaagaacagcgatgtcggagtagaagtccatgatttctacataaattctatcggagcaaaagagtatttcatggctcggaaaagcaatatcagttttcccaatatgggtcctcaaatagatggctacagaaatattgaacaatataaagaatacatatattccatcaatgacagcaaggcacatacattttattggaccgggaagaatattaagatagtaagtggtcagaacagctctacggtaacaatcgtaccgacacaacccggtaacgcaagtgtcaaagtgagctacaaatataaaaatcaaaccgataattttaccaatgagctacctttgagtgtatctaagacatcaatgcaactgattggccctgacgtaatctgtgacaacgggacattcagtatcaagaattttcccacaaaagcaacagtggattggattgttggcaacgatttatattcgcaattaaatcaggcatcacctgctatcaccctgaataatttagggacacccggaggcagttccatttatacgaccttaaccgcaatagtacacacaaaggaatacactgttcagttttccaaaccaattactttcaatgtatcaggaatacaagaaaatgaccatgacattatatatggctatctgtcacaaagcggaggtgaatgcggattgaatcctattcctgaaggtgcgcatgattttcattggagtgttgactgcgattgggaggtagacatgcaaggatattatttcactactttcagcagtcggaacagtcatgaaattgaacgagtttgcgtaacggttgatttcataaatgcatgtggaaccagaacatacatatataactatttcgacatcggctcaacaaattcaggaacttattccacacctaaaaacagcctttctccaaaatagccccagacagctttcacgaaaaagcccccatccatttgctcgttacacaaaagaagcttatatttgcttacttaaaaacagacagctatcatggtacagcaagacatacgatggatacagcgttttgaatatacccacgaactggcctggaaagtgatgaaggactatgcagaatatcaggggtataccgacatccgcagctcccgtgatgccatacgcaaagcccttgaaatgggattgattgatgacaagcaatggacggagactatagaagcccgaaatctgacatcgcacaatcatgacaacgatgtagtctctgaagagaaaatgcaatccttgaatacaccatccttattcgattgagctatgtacggattgaccgacaatgaactggaaaagctatgcaatctcttccggaaacatgaagaaatagagcaggctgttttgtacggctcacgagccaaaggaaatttcaagcctttttccgacatagacatcacgctgatgggagacagacttacgtataatactttaagcagcctttccgatgaaatagacgacctgcttttgccttacagcgtagacctttccatctatggcaaattaaagaatgccgaccttttggaacatatacaccgtatgggaatacccatattcagccgcccatcaaactaaactaaatttcacacatccaccctcaccaccctcacctttcgcacgcatcgccctattcatcggcattcaagaggtgggtgagagcaaatttaaaaagtgagggcaaaatttgccctcaccacaagatttcttcgttcaaagttataagtcactcattcttaccgtaatatcctgaaacgggtacataaatcggttgcagcattgttccctcattcttcaactttccttcggtgcgcagccgacggatatgccgcatggcagtagtacgcatcatgccgcaaacgctttgaaagtcattccgtgtcataaaagggcgagtggcgaaatagttggtcagccgacggtctatctctttatccgtcagtttagccgaatgctcgtttgccttcaaagcctttgccttgatggtaccaatttcatttttcagtttctggtcggcacgaaatttcacacccgccatcttcaccttcgtcaacttacgcttggtagcagccactaccggttcgatcgtggtgagcgacacgcgaaagtagccgatgccgtcgagatgcacctgccttccttcggcaagttccctgcccatgacgtgcgacacagcatcaagcacagccgtcacatcggtttctgtcaatgagcaacgtgcctggatgtcccgccgcaattcatcggtagacctgctcccatttaggcggagacggggatgaaggattttatcttccggagatttgtcgtacgagtccggattctcgtaccaatcaaacaaaatagccatagttcaaactgcgttaaagggttacattatacgataaagcactgcacggaacacgtgcgaagtacgtacgcagtctgttgaagtacaaaggttatatcacagcccagcccgtgagcagaaccgttcactgtagtgagctactccgttcactaatatgaacaagaaagaccactttagtggactgttcataaactctggtgtaaaaatagacaaaactatggggataagcaaagaaacaaacaccttttataaaagaaacatatagacattccaccccaaaaaagaagccaatcggaaaataatccttgaaaagcttgtatccccccctttcccggcgtatctttacaagaatattacatacacgataaagaatgaaaatcacactgatcagagaggaacgcgaaagcggaaaagaggccgtcagcacacaagaaacggacatgttgatggaaaagctgaaaacagagaacaagaccggatacattacggagctgcgtagcatcatcccgcatttgaaagggaccaacgcccgatatgagcatatcgacagactgccgcgtctctatcccgccgtagaaatgacccgcaccaaagcaggagaacaccggataaagacctacaacgggctggtactactggaagtaaacaatctggccggggtggccgaagccgaactggtgaaacaacaagccgccctgctgccgcaaacctttgccgccttctgtggctccagcggacgaagcgccaaaatatgggtacgcttcaccctgcccgacggagggcttccaaagaatgaagacgatatcgccttattccacgcccacgcctaccgcctggcagtgaagtgctaccaaccccttctccctttccccatcaccctccaggctccttcactcctacaaagctgccggatgaccgtggacgaacagccctattatagccccaccgccgtggccttctgcctggaacagccctgcgccctgccctcggaagacaactaccgccaacggaaacagcaggaaagcaatccgttgctgagaatgactcccggctacgaagtggcggacacatgcaacctgctcttcgaggccgccctcgaccgcgccttccgcgatttggacaactggcgacggggcgacgacctgcgcccgctgctgtcccgccttgccgaacattgcttcaaagccggcattcctgaagaagaagcggtgcgccagacactgatgcactactaccgggaggcagacgaaccccttgtacgcctgacgctgcataacctttacggggaattgaaaggcttcggcacccgcagcagcctgaacaaagaccaggaaactgctttccggctggaggagttcatgaaacgccgctacgaattccgctacaacaccgtgcttggcgacttggaataccggcagcgcgactccatccacttctacttccaacctgccgaccagcgcgtacgcagcagcatcgccatgaaggcactgaaagagggagtacgtgtgtgggaccgcgacatcacccgcttcctgtcttcggactacgtgccgctatacaaccccatcgaagaatatctctataacaccggacgctgggacggcaaagaccgcatccgcgcattggccgacctcgtgccctgccacaatccccactggagggaactgttctaccggtggtttcttggcatggtggcacattggcggggaatcgacaaacagcacggcaacaatacctcgcccctgctcgtaggttcgcaaggttaccgcaaaagtactttctgccgtatcctattgccaccggagctgcgtttcggctacaccgacagtatcgacttcaagagcaagcaggaagcggagcgcagccttggccgcttttttctgattaacatcgacgaattcgaccagataaacgccaatcagcaaggcttcttgaagcacctcctgcaaaaaccggttgccaacctgcgaaagccctacggtagcactattcaggaaatgcgccgctatgcctccttcatcgggaccagcaatctgaaagacctgctgaccgacccgtcgggaagtcgccgtttcatctgcatcgaagtgaccggtcctatccagacaaacgtcactatcaattatcaccagctctatgcccaagccatgcacgacatcatgaagggtgaacgctactggctggacgacactgacgaagcaatcgtaaaggagtacaaccgggaattcgagcgggtagacccattggaagaacttttcctttgccatttccgtggcgcggaggagagcgaagaaggcgaatggctcacagccatgcagattttcaacgacctgcaacagaaaacgagggataagttggccatcaaccggatagcagctttcgggcgcacgctccgcaagctggacatcctcaacaagaaatcgaaccggggaacactttatcatctggtaagaatagaagaatgaaccggcactcccaccgattgtaccaaagtgagggcaaacttggccctcactctttttataaaaagtatttccgtacgcagctgatgcagttcaaccattattaataaggtgaacagttgactatttgcaaattatgattgataatactaaaaatacccaaataagtgtttttgatattaaaataaaacgtatctttgttgcaaacaacgtcctccttaataatactattatgaagaaactgctgcttttagcctttgtgctatgtagttctttactgtgccgggcacaagaagaacgagttattttaggtgatgaacagacttccgagtattttccaatcctaaaagataaacgaattgccatattctccaatcatacaggaatgataggagacaagcatctgctggacattctgctggaaaacaagttcaatgtagtagccattttctcccctgaacacggtttcagaggagatgccgacgcaggcgaacacgtgtccagctcggtagacaagaagaccggagtacctatcctctcgctgtacgacgggaaatccggaaaaccaagcgaagcatccatgcgcaagtttgatatccttgtggtagacatccaggatgtaggcctaagattctatacttattatgcctctatgtgccggctgatggacgcttgtgcagaatacaaccgcaaggtgctgatactggaccgccccaatccgaacggacactacgtggacggcccgatactggacatgaaatataaatccggtgtaggttggctgccgattcccgtggtgcacggcatgacgctgggcgaactgggcctgatggtaaacggcgaacgctggttgccggcgtcacgcacttgcgacctgaccgtcattccctgcaagaactatacgcaccagaccctatacaagctgccgattcccccgtcccccaatctgccgaacatgaagtccatctatctgtacccctcgacctgctatttcgaggccactccggtcagtctgggaagaggaaccgacctccccttccaggtctacgggcatcccaacatgacgggctacagctacagcttcaccccgcgcagtgttcccggagccaagaatccgccccagctgggcaagctttgccacggcgtgaacctgagcaacatgagcgacgaggaaatctggaaacgcggtattgacttgagttacgtgatagacgcttaccggaatctgaacatggacgaccacttcttccgttccttcttcgaactgttgataggcaccgactacgtgcgcaaaatgataaaggaagggaagagcgccgaagaaatcaaggcaagatggaaagacgacgtagagaaattcaaggtacagcgcaagccctacctgctctacgaagaataaagggatgtacgatttgacgatttacgatttacgataaaaaaatgaacgtgaattggaagagaacgtcagagcgtacataggataatcaaagtcgtacatatcatcaaaagaagtaatttcaatcgtaaatcgtaaatcataaaatcgtaaatcataaaatcgtaaataacctcatgactccactatccgtaatcatcaccatagccgcctacttcgcgatactgttcacggtatcctatattgcaggaaggaaggcagacaacgccggcttctttgtaggtaaccgcaagtcatcctggtatgtcgtggcgttcgccatggtcggttccgccatttcaggtgtgacctatgtatctgtacccggcatggttgccgccagcagcttcggctatttgcaaatggtgttgggcttcattgccggacagctcatcatagcctatctgctggtaccgctattctacaaaatgaacctggtatccatctacgaatatctggagaaccgtttcggcatgtcttcctaccgcacgggtgcctggttcttcttcatctccaaaatgctcggtgccgctgtccgtctgttcctcgtatgcctgacgctgcaactgctggtattcgaacctttcggactgcctttcctgctgaacgtggccatcacggtggcactggtctggttgtacactttccagggtggcgtaaagtctcttatctggacagactctctgaagacattctgcttggtggtgtcggtcgtactctgcatctggtatatcgcttccgacctcaatctgtcatttaccggtatggtaagcaccattgccgacagtgacatgtcccgcatcttcttcttcgacgatgtgaacagcaagcagtacttcttcaagcagttcctcgccggtgccttcaccatgattgccatgaccgggctggatcaagacatgatgcagcgcaacctgagctgcaagaacttcaaggactcacagaagaacatgattaccagtgtcatttcgcagttcttcgtcatcctgcttttcctgatgctgggcgtgctgctctacatctttgccgccaaccagcagattgcggtggagaagagtgacgaactgttcccgctgattgccaccggcaactatttccctgccattgtgggcatactgttcatcatcggcctgatttcttctgcctattcagccgcaggctcggcactcaccgcgctgaccacttccttcaccgtagacattctgggaacgaaaggcaagtcggaagagacggttgtgaagatgcgcaagaaagtgcacatcggcatggcggttgttatgggaatcaccattttcgtattcaatcttctgaacaacaccagtgtcatcgatgctgtatatatcctggcaagctatacctacggtcctatcttgggtctgtttgctttcggcatcttcatgaaacaacaagtgcgtgacaagtacatcccgctggttgccatcgcctccccggttctctgcttcattctgcagaaaaattccgaagcctggttcggaggttatcaattcagctacgagttgctgattttcaatgcactgttcactttcatcggtctctgtctgttgattaggaaagataaaaagaacaattaacttaatacatcatctatgaacgtaagacgtcagtttttactaagtttgcttgccgcctccctcttcccccaatggggaggtgcgcaagaacttccgacggatgtccgccaggaaatcgggaaattcctggataccaccgcacggaaagaagtttccgtaggacgtatcagcatcgactcagtggccgtggaaggaaatacgctgcaactgtttgccaacatgaactgtgcctatattcctttccgcgaggacaatgtagccgaaatataccagggcgtaagtgccctgctaccggcggagtttaccaaatacaagctgcaaatccgtaccaacaagcgcagtatcgaagaactggttccccaagccctgcgcagtaaaaaagacaaaaagacgaagacattcagccccgtcgcttccaagcctctggttaccgaagtttcctccccctacacccccaccaacggcttgcataaccggcatatcgccctatggcaaagccacggctggtactacgaatcaaaactcgaccgctgggaatggcagcgtgcgcgtatcttccagacagtggaagacctctacacccagagctacgtattgcccttcctcgtaccgatgttggaaaatgccggtgccaatgtgctgcttccccgcgaacgcgattgccagacggcagaagtcatcgtagacaatgacggttgcctgaccggccgttccgtctatacagaaaattccggtgacaagctctggagtcagggagaaggacaaggcttcgcccacctgcgcccccaatacatagactttgagaatcctttcaaggaaggcacctaccgcgccatagaaaccatcaagaaaggaaacgcaagcaccgccgaatggattcccgaaatcccttcgaccggacaatacgccgtatacgtctcttaccaaaccttgccaaacagcgcggacgatgccctttacaccgtctatcacaaaggcggcaccacgcagttcaaggtaaaccagcaaatgggaggcggcacctggatttacctcggcaccttcggcttcaatgccggccggaacaatgaatgcaaagtcgttctgagcaacctttcctccaaagtaggaagaatcatcactgccgacgccgtgaagataggcggcggcatggggaacatagctcggggagaagtcagcggttatccccgtttctgcgaagccgcccgctactggctgcaatgggcaggcataccggacagcgtatattcagaaagcaacggcaagaatgactataccgacgactataaatgccgtggtatctgggtgaactacctttccggaggctctgccgtgaacccgacggaaaaagggctgaacatccctgtcaacatggcctttgccttccactccgatgcaggaactacactgaacgattccatcatcgggacactcggcatctactataccaacgcctacaatgagaaattcgccaacggagcatcccgctacttgagccacgacctgacagacttgattcagtccaacatcgtgcgtgacgtgcgtaccctctacgaaccccaatggacacgccggggcaaatggaaccaatcctactatgaggcccgtgtaccccgcgtacctaccatgctactcgaactactttcccatcaaaactttgcagacatgcgctacggactggacccgcgtttccgtttcaccgtaagccgcgccatctacaaaggtatgcttcagttcctctgctcacaatacaacatggattatgtagtgcaaccgttaccggtagaccacatggccttgcgcatgaccagcgagaacgaagtggaactgacctggcaacccgtagcggatgcgttggaaccaactgccgtagcagagaaatacattgtttatacccgtatcggcgacggggatttcgacaacggagtattggtggacggcaacagttaccgaaccacgctccccgccggcatggtatgcagctacaaggttaccgctgtcaacaagggcggcgagagtttcccttccgaaattctttccgccggacgggcgttcaattccaaaggtaccgtattggtgataaacggattcgaccgcatcagtgcccctgccgactttacggcccccgcccccgccgacaccctccttgccggatttctggatgagcaggaccacggggtcccctatatccatgacatcagctacattggcaagatgaaggaataccgccgttccattccctggatggacgacgacgcctccggtttcggcgacagttatggaaattacgagacccaagtcatcgcaggaaatacgttcgattatcctgccatacatggtgccgctatcctgaaagcgggatattcgtttgtatcggttagtaatgaaagtctctcccccgtaggaaagggagagaagaatactccagtggatatgagggagtataggtatgtggacttgatacttgggaagcaatgccagaccaagatgggacggggaggcgtaaaaccgttggagttcaagactttcagcaaaccgatgcaggaggctattgtggcttattgtaagcaaggtggaaatatctttgtttcgggcgcttttgtaggaacggatttatgggacaaccgccttgcaactgccgacgaagccgacaagaaatttgcgatggaagtactgaaatataagtggcgtgtgggacaagcggctacaatgggtaaggtgaaaagcgtagcttctccgttccccgccctttcaggaaactatacctatcacaatgagctgaatgccgattcgtatgtggtggaatcaccggacgccattgaaccggcaaccaaagatgcacacaccgtaatgcggtattctgaaaacaacctgagtgccggtgtggcctaccagggcgactacaagacttttgtattgggattcccttttgaatccatacgtactgattctgaaagagaggcactcatgaatgctgtgctgacattcttcaacgacaacaaataatatcaaccaatcatcatctatgaacagaagactgttaataattgtcctgatggcttgcctgctccccctggggatgcaggcacagcaagggacattccgttttgcccaactgacagacattcatctgaccccgaacaatccgaatcccactgaggacttgctgcgttccatagcacagattaatgccaccgacagtatcgactttgtcctggtgacgggcgacctgaccgaagaaggcgaccgtgccaccatggaaaaagtgaaatcgtgccttgacttgctgaaagtaccctaccacgtagcccttggcaaccatgaaacgaaatggagcgactccggctgcaccgctttcggagaaatctttggcggcgaacgcttcgagttcgagcataagggattccttttcctcggcttcaactccggtccgctgatgcgtatggcctacgggcatgtagtgccgcaagatatccgttggatgacggaggaaatggagaaaaatggcaaagacaaaccggtgatacttgtcacccactacccgctaatggacggggatgtggacaactggtatgaggtgacggatgccgtccgcccttacaacgtgcgcctgtttatcggcgggcattatcacagcaaccgggatttacgttatgacggcattccgggcgtactgatgcgcagcaacctgcgcgacaaagaaggaaaaccgggttatggcatttacgaagtaaccaaagactccatccgtgtatacacgcaacgtatcggcgagcctaagaagcaatgggctgccttctcgctggccgggcaatattacgaccgcaatggaaaagcggagaaatatcccgacttctcggtcaacaaggaatatctgaaagtaaaggaacaatggatggtacagacgggtgcaggcatttactgctcgcccgccgtagaaaaagataaagtgttcgtaggagacgatatgggacggctgacagcctacgccctgaaaaacggcaaaaagctatggagctttgaatccggcaaacgtattgtcggtactccggccgtaagcgaaggtatcgttgtattcgggtctgccgaccgccacatctacggattgaatgccaaagacggcaacctgctctggacggtaagagctgccgaaccggtactcggagccgtgaccatcgcagacggtaccgcctacatcggtgccagtgatgccactttccgcgccacagacatccatacaggaaaagtaatctggacctacaccggcgtgaagggctacatcgaaaccaagccgttggtgacggaagacaaggtcatcttcggcgcatgggacaatacactgtatgccttgaacaagactgacggacgtgagttgtggaaatggacgggcggactgacccgcatgcacttctctcctgccgccgtatggccggtagctgccgacggtaaagtattcattaccgacccgcaacgcgccatgaccgctatagacatccatacgggcaataccgtgtggcgcaccttccagtccatggtgcgcgagaccatcggactttccgaagacggtgaacgtatctatagcaaaacgatgaacgacagcattgtttgctatgcagctcaaggagatactccgcgggagttgtgggcaaccaatgtaggtttcggttatgagcatgccccctccatgcaagtggaaaaagagggggtaatgtttggcagtaccaaagaaggacttatcttcgcactggaaggaaaaacaggcaaagtactgtggaaacataaaataggaaattcactcatcagtaccgtagttccgttgaacggccacgaagttctattcacggcaaccagcggggaagtgggacttctgagaattaaaaattgagaattaaaaattaaaagatatatcatgaataaaatcagttgctttcttccctacgcaggaaaagaacaagtagaaaaaacagtgaatagcctacaggcgacaggacttatagaagaaatccggttaatcacgaccgatgccactctggaatcgctcccggactgcgaaatattgtttgttgacatgccctacagcagtgcaactctcaaagctattgctaatgcagccaagggagaatacacattgctttataccaaagagactacgctcgaaatgggtatgtttgcactggaacgtatgatacacatccttgaagattcaagcgccggtatggtatatgccgaccactaccaaatagcagacggcaagcagagcaacgctccggtaatcgactaccaattcggttccttgagggatgacttcaactttggctccctgctccttttcaacaccgaaaaactaaaggaagccgccggacacatgaagtctgactacaacttcgccggactttacgacctgcgcttgaaattgagccaacattcaaacttggtacatatcaacgaatacttatacagcgaggtggaaaacgatacccgcaagagcggcgaaaagattttcgactatgtagaccccaaaaaccgtgaccgccagattgagatggagcaggcatgtaccgaacatctgaaagaaatcgggggatatctggcaccggagttcaagaagattgagttctctgccggtaactttgagtatgaagcttcggtcatcattccggtgcgcaaccgtatccgtaccatccgcgatgccatcaagtcggtactgatgcagaagacagacttcaaatataatcttatcatcatcgacaaccactccacagacggcacaacggaggccatcgacgaattcaaggacgacgaacgcctcatccatatcgtccccgaacgcaacgacctcggtatcggcggttgctggaatgtaggtgtacaccaccccaagtgtggcaagtttgccgtgcagctggacagcgatgacgtatacaaagacgaaaatacactcgccatcatggtccgcgccttctacgagcagaactgcgccatggtagtaggcacctatatgatgacggacttcaacatgaacatgattgctccgggcatcatcgaccacaaggaatggactccggcaaacggacgcaacaacgccctccgcatcaacggtctgggtgccccgcgcgccttctataccccggtgctgcgcgaagtgaaagtacccaataccagctatggcgaagactatgcactgggactgaacttctcccgccaataccagataggacgtgtgtacgacgtggtctacctctgccgccgttgggacgacaattccgacgcctcactggatattgtaaaaatgaacggacacaacctttacaaagaccgtatccgtacttgggaactccaagcacgcatagcaatgaacaagaaaaagtgattgcacaccgtaaatcatcaaataacagacaagctcatgaatcaaacgatacacaatcttctaaccggacaactggcatcctgggagacggcacgcaacaattatgctgccctctccggtgtgcgggtgaaagagctgaatgtaaacggcataccctataaggtacagttcaacccggcacgcatcgtttcctccggtgccaaggtggatgccaagtccattcaggaacgaaaatgctttctgtgcccggcaaacctgccaccggtacagaaaggtatcccatttggcgggcactaccatattctggtgaatccgttccccattttccctcgccacctgacgataccggaactggcgcatactccccaacgcatcgcttcccgcttcaccgatatgctggagctggccgaggcgctgacggaatataccattttctacaacggtccccgatgtggcgcctccgcccccgaccatgctcatttccaggcaggaaacaaagggttcatgcctattgaaaaggactggcgcggacagactgccgggaaaatagccgattataggaaagcagcactgtggtatcttgacgacgctccccgtgccacacttgtgattgaatccacctccaaagaggacgcggcagacttgttcgacatcatttaccgttctctggacgtgaaacccgaagaagacgagccgatgatgaacgtactggtcctatacgaggccgaccgttgggtggtctttgtcttcccgcgcgagaaacaccgccccgcctgctatactgccgaaggagaagccaatctgttgagcagcccggcatccgtcgacttgggaggtgtctttatcacccccgtagaaaaggatttcttgaaaatcactgcggaagacgtggcgcagatattaagtgaagtatgcctctctgccacagatttccacaaggtacggcagcgtatcagggaaaaaatatgacttctgaaatccaagaactctaattttaaagaaataccattatgaaagagcccaaagtacaagtaggcattctgtttgaaccgcagatagaattcgttttgctgaatccgtatcgcatggacggaacggaagtcagcggcaagcaggtagtgacctacgacgaaggcaagattctctggaatggacgccggtatgacgaactgctgtttgaaccgcaacacgagcagaccgatgccttcgaactattggacgttaccatcggcatcaatttccattgggagcgcaaggaagaccagcgttttctgggtgctctcaaaatcatcgttgagaatggaaagctcaccagcatcaacgtcatccatgtagaagattatctgaccagcgtcatctcctccgagatgagtgccaccgcttctctggagctgctcaaggcacacgctgtcatctcccgaagctggctactggcacaaatacaaaagaataaggaaatcaccgaagcccaagctaactactcggcctttacgcagaccgacgaagagctgattcgctggtacgaccgagaagaccacacacgtttcgatgtatgcgccgacgaccattgtcaacgctaccagggcattacacgtgcctctaccgatattgtgaaacaagccatctccgctacccgcggccaggtactgacatctgatggtaagatttgcgacgcccgtttctccaaatgctgcggcggtgctttcgaggagttccaatactgctgggaagacatcaaatacccctatcttgcccaacaacgagacagcaaaacgcacgccacactgcccgatttgacgcaggaagtcgaagcggaccgctggattcgtacctcccccgaagcattctgcaacaccaccgacaagaaaatcctctcgcaggtactcaataactatgaccaggagactacggacttctatcgctggaaagtggaatatacccaagaagagctttcagccctcattctgaaacgttcgggcatcgactacggacaaatcatcgatcttattcccatagcccgcggaaccagcggacgcctctggaaactgaagattgtgggaaccaaacgcacactcaccatcggcaaggaactggaaatccgccgcacgctctccacttcacacctctacagctctgccttcgtggtagacaaagaggagttgtccgccgaaggcattcccggacgcttcatcctcaccggcgccggttgggggcatggtgtgggactttgccaaataggtgcagccgtgatgggcgagcaagggtataagtatgatgcaatactgctgcactactatataggtgccagcattgacaagctgtatgaataatcgaatagaacacaataaatcaatatcatgaaccatacaaaaaacatatcgccatgggcatgggtacccaccttgtactttgcacaaggcattccatattttatcgtaaacaacatctccgtgatgatgtttaccaaaatgggcgtaccgaacggagaaatggccttgttcacaagcctgctctatctgccttggactatcaaacccttctggagcccgtttgtcgacatcatcaagaccaaaagatggtggaccctttccatgcagattctgatgtctgtggcattcatcctgctgacgctgtccattccacggccggacgaggcgactatggcagccggaacaacccccatcagcatgttcagcatcacgctgatgctgttcatcatcacggcttttgcctctgccacacacgacattgccgccgacggcttctacatgctggcactgaaacagagtgaccaggcagccttcgttggcatccgaagcacgttttaccggctcgcctctatcttcggacaaggcgtgctcgtagccattgccggcgccatcgaactgagaaccgaaaacattccgctgtcatggaccatcacgatgctggttacagccgttctgttcagcctggtgacgttctatcacctctttgcagtccccaaacccacctcagataagtcaacactggctgccgatgccgccactgcaggagctatattcagagaattcggacgaacattcgccacctattttaccaaaccgggcgcattgctggccatcgtgttcatgttgctgtaccgcctgcctgaagcattcctcatcaaaatgtgtatgcctttcctggttgcctccaaagaatcgggaggtctggaactatcgacagcagaagtaggtatcgtatacggcaccatcggagtcatattcctcaccctgggcggtatcctcggaggattgttcgcatcacgcattggcttgaaaaaatccatctggtggatggcaggatgcatgactctgccatgcctgacgtttgtctatcttgccattgcccagcccgacaatctgtttgctatctcaaccgccatcgccatcgagcaatttggctacggcttcggtttcacggcctacatgctctacatgatgtacttctccgaaggtgaattcaaaacatcccactatgccatctgtaccgcattcatggcactaagcatgatgataccaggtatgtttgcgggatatatccaggaggctatcggatatacggacttcttctggttggtaatgatatgctgtttcgccacggttgttgtcaccatttttgcagacagaaggatagacccggaatatggaaaaaaatgattaatggttaatgattaatgttttgtgagtaatatttagtgattggttatgaagaggactattattatatccttgctctgcctcctttgcggaggtgcgatgcaagcacagaagatcagaataaagaccggtatcgaggtactgaaagaacagaatttccgatgcctggaaggtaagcgtgtaggattgattaccaacccgacgggggtggacaaccggatgaggtccaccattgacatcctgcacgaggcgcccaacgtgaaccttgtggcactctacggccccgaacacggcgtgcgcggcgatgtgcacgcaggcgaccatgtgacggacatcaaagacgcgactaccggactgcccgtctattcgctttacggaaagacccgcaaggccacgccggacatgctgaaagatgtggatgtattagtgtatgatatccaagacatcggttgccgttcctttacctacatcagcaccatgggactggccatggaagccgctgccgaaaacggcaaggaattcattgtgctggaccggcccaatcccgtaggcggattgaagattgaaggcaacttggttgaagatgattgcatttcttttgtaagccagtttaaaattccgtacctttacgccctcacttgcggtgagctggcactgatgctcaatggcgagaagatgttgaaggatggggaacaatgtaatctccacatagtgaagatgaaaggctggaaacgcaagatggattatacccaaaccggactgcaatgggttccctcctctccacacattccacatcctcattctgcattcttctaccccgtcagcggcattctgggcgaactaggatatatgtctatcggcgtggggtataccattccgttccagatgtttgccgcaccatggatggaagcggaaaagctggccggaaacctgaaccgtctgaacgtaccgggggtcatcttcagaccgatgtacctaaagccgttctatagtgtaggcaaaggcgagttgctgcaaggtgtgcaagtgcacatcatggatttcggcaaagcaccgttgagcgacctgcaattcctggtcatgcaggaagtcgccgccctctatcctgaccgtgccgtgtttgaccatgccgacaagggacgtttcaacatgttcgacaaagtaagcggttcgcggcagatacgcgagcgcttctcgaaacggaaccgttgggaggacatacgcgactactggtataaagatgccgaagacttccgtaagttgtcgaaaaagtattatttatataaataaatttacagataaataaggaagggaaaagagcctgatacggagactatttcagtcgtatacagaaccacattcagtcgtatacttaaatatattcagtatacgactgaatgtaccccctcgtaagacacgtttacagagcactttgaagcgaagtgatgcaataaaaaaagtgaacatgaaagagcatagttacatggctttcctgcaggaagcaaaacaattcattccgcaggaaaggatttacaccgacgaacttcgccggctggcttggggtacggatgccggtttttaccgactgattccccagattgtaatccgttcgaaagacgaagatgaagtttcacaactgttgaaactggcgagccgccacgggctgcccgtcaccttccgagcggcagggaccagtttgtcgggtcaagccattagcgactccatcctcatcgtagccggtaagaattgggaaaaatacagcatatccgccgactacgaacagataaccctccaaccgggcatcatcggacaacgtgtgaacgaactgttggctccctacggccgtaagtttgcaccggatcccgcctcggtgaaaagcgccatggtaggcggtattgtcatgaacaatgcttccggcatgaactgcggtacgcacgccaatagcgacaaggtgcttgtttccgcccgtatcatcctaatggatggtaccctgctggataccggaaatcccgtcagccgcgcctccttcgaagtgagtcaccgtgacttcattcgccgcatctgcgaactgcgcgatgaaatacgtaccaacgaaaaactggccgaacgcatccgatacaaatattccatcaaaaatgtaaccgggctcaatctgctgcccttcgtccgtttcgacgacccattcgaaatcattgcccacctcatggtaggttccgaaggtacactggcgttcctttcggaagtgacgatgaagactgaatatgattatccctacaaggccagcgctatgctctacttcaagaccatcaaagaagcgagccgcgctgtggtagccatgaagaagctggtcgacgaaaccggcgaatggacagtaaaaggggctgaaatgctagactataagagcctttcttccgtcaatgaccccgtattcctaaaatacaaaggcaaagttgcctcctctgccctccccggcgtggagcccggcgacgaaaccgggttgacagcagtgctgaccgaaaccaaagcccgtaccccggaagaactgcaacagaacatatctgccattgaagcttgcctgcaagccttcaccacctatattccggtacgcttcaccgaccgtccggaggaatattccaaatactgggccatccgttccggcatcttcccctctgtgggaggtacgcgccagccgggaaccacttgcctcatcgaagacatcgccttccacattgaagaccttccggaggcaacggcagaactgcaacagctcatagcccgccacggatataatgacgcctgcatctacggccatgctctcgaaggcaactaccacttcatcatcaaccagtccttcagtacccaagcggaagtgaaacgctacgaagacttgatgaatgacatcaagaccttggtagtagataaatatgacggttccctaaaagccgagcatggcacgggccggaatatggctccctttgtccgccatgaatggggagatgacgcctacaaagccatgaaagccgtcaaagagctgtttgacccacaaggattgctaaaccccggtgtcattttcaatgatgacccgcaatgccatatcaagaacttcaagccgctgcctttattagtgatgagtgacaagagacaagctacgtcactcgtagctgacaaatgcattgagtgcggtttctgcgaagtcaactgtctctcctgcggctttaccctttcctcgcgccagcgtatcgtgttgcagcgcgaaatatcccggctgaaacaaagcggtgaggacccgacacgccttgcactgctcgaaaaacaataccgctatcccggcaaccagacttgtgccggagacggcctctgctccatgtcgtgcccgatgggtatcaatacgggcgaccttacccatataatccgccaggaagcattacccaaaggcagtctgggatacaaagccggagactttgtcgccaatcatttcgctggtgtcaagagtgcactgcgtcccgtattgtccttagccaacttcggacattcactattagggacaaaggcgatgagcggcattaccaaggggctgcacaatgcattaggcatacctctatggacgccggctatgccgaaaagttatcagttacaagctacggagttacaagctacaagcactatgcagcataatagcgcagcacttgtagctcgtagctctgtaactcgtaactacaaagtcgtctacttccccagctgcatcaaccagactatgggtctggcaaagaagtctcccgtagagcagccattggtaaataaaatggtgtccttgttgcaaaaagccggttacgaaatcatcttcccgaaagatatggacaagctttgctgtggcaccatttgggaaagtaaagggatgctggacattgccgatcgcaagacagccgaactggaggccgcactttgggaagccagcgaacaaggcaaataccccgtcctctgtgaccaaagcccttgtctgcaccgcatgcgcgaatgtatcaagaagatgaaactgtatgaacctgcagaattcatctatacattcttacgtgagaagctgattttcacacctattaaccgccccgtagcaatccacatcacctgctccatgcggaaaatgggactggcagataccattatagcccttgcacgcctttgctccagtaaagtcatcgtgccggaagaagtaggttgctgcggttttgccggagaccggggattcacctatcctgagctgaactcgtacgccctacgcaaactccgcccgcaaatagaagcgtccggagtgaatataggctactctaacagccgtacttgtgaaatcggattgacaacaaactcaggtatcccctatgtatccattgcctatctggtagacgaatgtacaaaggcagctgataattaggattgataattaacttaacacacaaatattacaatgaacagtacaaaagtaagtaaacgcatccttgcactcgacattctccgtggtgtcaccatcgcaggtatgattatggtaaacaaccccggttcgtggggacatatctatgcccccttgcggcatgcagagtggaatggtctgacccccaccgacctcgtctttcccttcttcatgtttatcatgggaatttccacatacatttccctgaagaaatacaacttcgagttcagccacgccgccggcatgaagatactgaaacgcaccatcgtcattttccttataggcatggctatcggctggttctcgcgtttctgctattactgggcctccgctccggacgacctcagtttcggagagaagctatgggcttccgtctggacattcgaccgtatccgtattctgggtgtcatgcaacggctggccctttgctacggagcagcctccatcattgcactaaccatgaagcataaacatataccttatctgatagccggcctattgacaggctacttcatactgttgatgtgcggcaacggtttcgcctataatgaaacaaacattctttccgtggtagaccgtgccatcctgacccctgcacacatgtacaaggataacggcatagatcccgaaggtttgttaagcaccattcctgccattgcacatgtgttgctgggcttctgtgtagggcggctgatgctggatggcaacaagtcggaagaccgtgcctcatttctcaattcgcagcttatcacactgttgctggtaggtgttatccttactttctccggtttcctgctaagctacggttgccccatcaacaagaaaatatggtctcctacctacgtactcgtcacttgcggactggcatccagttttctggcattgcttatctggattattgatgtgaaaggctataagaagtggagcatgtttttcgaggcattcggtgtgaatccgctgttcatgtatgtattgggcggcgtacttagcatacttttcggtagtatcagtttcccgtggggaaacagcagcatcagcatacacggattcttatacaatatagtcctcatgcccgttttcggtgaaaccgccggttcccttgcctttgccctgctgtttatcgccattaactggtgtatcggctaccagttgtacaaacgaaaaatatatatcaaaatataaggattaggggttagtgattaaggattagtgattaatacgttgcctataattaagaaacagtatcacctaccattaatcactaatccttaatcactaacccctaatccctaatcattaaacattatttatatgattctaatagcagacagtggctctacaaagaccgattggtgtgttgtagagaatggagtacttctccaacagatattcacgaaagggacgaaccctttctttcagtcggaagaggaaatcagtaatgaaatagcaacagcgctattacctcagctgaagacaagtgagctggatgccgtatacttttatggtgcaggatgcggatttcccgacaagataagtatggtgcaccgtgccataaccaaacacctcagtgtgaaaaatgaagtggaagtcaataccgatatgctggctgccgcacgtggcctctgcggacatgactcaggcattgcctgcatcatggggaccggctccaactcatgttattatgacggaaaaagcattgtcaccaatgtatctcctctgggattcatcttgggagacgaaggcagcggagcctgcttgggcaaactgttggtaggcgatatcttgaaaaatcagatgacacccgagctgaaagagaaattcctcaaacagttcgacctgacacctgctgatatcatcgaccgtgtctaccgtaaacctttccccaaccgtttcctggcaagcttgtcaccatttcttgcacagaatctgggtgaaccttgtgtacgcgctctggtactgaacagctttaaggcattccttaaacgcaatgtcatgcaatatgaagactatcagcatcaaaaagtacatttcatcggttccgtagccttctattacaaggaagttctggcagaagctgccaaagaaatgggtatccaactgggtgcaatcatcaagagccccatggaaggactcatcaaatatcacaactgaaagtgacaaatcgtaaatagtaaatcgtcaaatagtaaatagccttatgttcgtaaaaatctcagagcaaccatcgctctacaatgacttggaaaagaaatcagtccgtgaaattctggaagacatcaataccgaagaccagaaagtggcgcttgccgtacagagggcaatccctcaaatagaaaagttggtaacccagattgtgccccgcatgaaacaaggcggacgcatcttctacatgggtgcgggtaccagtggacgtctgggcgtactcgacgcttcggaaattccaccgactttcggtatgccccccacgctggttatcggcttgattgccggtggtgacactgcattgagaaatccggtagagaatgccgaagatgacattcaccgcggttgggaagaactgacggaacgcaatattacagataaggatacggtcatcggtattgctgcatccggtaccaccccctacgtgattggtgccatgcacgaggcacgcgaacacggcatactgaccggctgtattaccagcaacccggactctccaatggcagcagaggcagatgtagccatcgaaatgattgtagggcctgaatatgtgacgggaagctcacgcatgaaatcgggaacaggacagaaaatgatactgaatatgattactacttccgtcatgatacagttgggacgcgtgaaaggcaacaaaatggtgaatatgcagctcagtaacaaaaagcttgtggaccgtggtacccgtatgattgtagaggaactcggactggactatggcaaagccaaggcgctgctgttgatgcacggttcggtgaaaaaggcagtggatgcgtaccggatttagctattactcactcttaaattcctttattatgaaagcaatatatttttttctcttttctctttgtctgcaagctgccaccgcgcaacccttgcaacgcgtagcccctgaacaagtgggaatggactcacgcaagttgatgtatgctgacgaagcgattgaaacagccatctccaacaaggatattcccggtgccgtacttgctgtagtacgtaacggcaagatggcctatctgaaagcttacggcaacaagcgtatttatcccaatgtggagcctatgactgccaatactatctttgatatggcatcttgcagcaaatccatgtcgaccgccgtatgtacgatgatactggcagaacgcggcaagctccgtatgctggaccccgtcagcctctacataccccatttcaagaattgggaaagcgaagacggcaaagagaaaaaggtaatccgcattgccgatttgatgacacacacttccggtcttcctccctatgcaccggtagccgagctagaaaagcagtacggttctcccaatcctgatgggcttatggaatatattgctacttgtaaacgcgacttcaagccgcagactgattttcaatacagttgcctcaacttcatcactttgcagcacattatcgagactataagcggacagagcctgcgtgactttgcacgtgaaaacctatttgatgtactcggcatggagcataccgactatctgccttgccaacgtgataaggatggtaactggattacgatagttgacaaaggaacgagaaaacaaggacacaaggaaaacaacgtagccaattctcaattttcaattcgcaattctcaattgaataacattgcccccactgaaaagcaacctaatggacaagttctctgcggacaagttcatgacccgctggcacgtgtcatgaacggaggtatcagcggtaatgcaggagtattctcttgtgctgatgatattgccatactctgcgcagccctgcaaaacggaggtgaatggaacggacgccgcatcctgagtccgctgggtgtaaaagccatgcgtactgtgccacgcactaccgccagtctgggacgcactctcggttgggataattttacagcctatgcctccaacaatggagatttgtttggtcctaatacctatgggcataccggctacacgggtacctccatcattatcgatccggacaatgacacttccgtcatactccttatcaacgccgtacatccggaagacggacacagcgtagttcgcctgcgttcattggttgccaacgctgtggcggcttccatctaccccattccgcgtatttatacagaccattactacaaacgtttcctacagtttatggatgagcctgccattacaagcaaggacatcgtcatgcttggcaatagcctgactgaaggtggcggtgactggtctgcccgtcttggtaagaagaatgtacgtaatcgcggcatcatcggtgatgaagtgatgggtatctatgaccgcctgcatcagatacttcccggacatcccgccaagctgttcctgcttatcggagtcaatgacatttcccatgacttggcaccagacagtattgtagacatgattcgcatgacggtggaacgcatccggaaagaatctcccgacacaaaactctacctacaaagcctactccctttcaatgaaagtttcggccgatacaaaaaactgactggaaagacagatatggttcctgaaatcaactcccgtctggaggcgtttgccaaagaggaaggcattgcctatatcaatctttttccactatttacagagaagggaacaaatgtactacgcagtgagttgaccggcgacggactgcatttgaatgaggatggatacaaaatctgggtaaaggccattaagaagaaaatataaaacgaaccagtctccgaacgtctgccacactaccaacaggctaaagaagacatctctccattaactagattccccctgccatagacatctatagcagggggaattcttatattcggggcgtttcggcacacaccctcttttatctcattcggcaaagctaaccagttgcaagtcaaacgtcaacagagagcctccggggattgtatttgtagaataaggagcagtataatcatttataccatatccgctttgataagggatatacaacatccaccgctcacccatccgcataagctgcaaggcagctgcccaaccggcaacgacacccgaaacttcaaaatccacgaatgaatcaaaaaccgtaggttcttttaccggaggaataggtatatcgcggtcaatagcactataaccgtcaaagcaaccgtcgaattcttcgccattcacataagtcccataataataagcattcacctttgaatgataacccgtatacaacgggcgttcacccgtctcattcttcacaagcttcttgcaatagacatactgagcaccttcagaagtgcttgcagtcgtctgtatggcatacagtttcccgagttccatagcatcggcctgctctgctgtggcgacataattctcgccagtcagcctttttatcgagtcaacaaaagcctcgccgcgttctctccaattatcatactttccagcctcttccacttcttcacaagagataaaagcacccaccagcaacagcaagaaaggcaaaaacaaaagggactttttcatttactattttactattttactatttactatttcagtttgttcacgcaccggtctattccataaccgctttattgcaaggttttcagcaacgatgtgatgcttacacggtctgcaataatattattcagttcagagatagccacgcgctcttgctgcatggtgtcacgattacgcagtgtcacacagttatcttccaaagtctgatgatccacggtgacacagtacggagtaccaatggcatcctggcggcggtaacgcttaccaatagaatctttctcatcatactgacaatggaagtggaacttcagattgtcaatgatttcgcgcgctttttcgggcagaccatctttctttaccaacggcattacggccagtttcaccggtgccagtgcagcaggcaacttcaagacaacacgggattcaccgctatccaacgtctcttcacagtaggaagccgacatgatgctaaggaacatgcggtctacaccgatactagtctcgatgacatacggggtatagctttcgttggtttccggatcgaaatacttgatgttcttgccggagaacttctcatgctgggacaagtcgaaatttgtacggctgtgaataccctctacttccttgaaaccgaaaggcatcaagaactcaatgtctgtagcagcattagcgtagtgggccagtttgtcgtggtcgtgataacggtaatggtcatcaccgaagcccagcgccttgtgccatttcaggcgagtagccttccaactcttgaaccagtcaagctctgtacccggcttcacaaagaactgcatttccatctgctcgaactcgcgcatacggaagatgaactggcgggctacaatttcgttacggaaagccttaccaatctgggcgataccgaaaggaatcttcatgcgaccggttttctgtacattaaggtaatttacgaagataccttgtgccgtttccgggcgaaggtatatcttcatggcaccatcggcggtagaccccatttctgttgagaacatcagattgaactgacgtacctctgtccagttctttgtaccactgatagggcaaacgatttcttcgtcaaggataatctgacggagttcgtccagattattatcgttcaaagccttggaaaaacgttcatgcaaggcatcacgtttggcctggtgttccagcacacgaccgttggtactgcggaactgagcctcatcgaaagcctcaccaaaacgcttggcagctttggccacttctttgtttatcttgtcatcgtacttagcaagctggtcctctatcaacacatcggcacgataacgtttcttggaatcgcggttgtcaatcaaagggtcattgaaagcatctacgtgtccgctggctttccagatggtggggtgcataaagattgctgagtcgataccgacaatattttcgtgcagcagcaccatactctgccaccagtattgcttgatgttatttttcagttccacacccatctgaccatagtcatacacagctcccagtccatcataaatctcgctggaagggaacacaaaaccatattccttacagtgtgatacgagtttcttaaaaacgtcttcttgtgccattttctgttgtatctaaattaatttgaatcttactttcagctaaaaagcgccacaaagatagggatttatatcgtaagtaggacatggagggtattaatttatcttattaccaaataaaagaagaagctacctcataactccgaggcagcttctttcccaattttacccaattacaattaatttacctaagcactacaaatcaacctaatcacaactaagaataatattatactcaccttcagcgctttatcgtattaacagtttcttgtggtttcaatatgtcatttgttttttccacaactgataccacatcaacatcaagtgcagccttaatatccttggaagaggttccaatcaaaaacttataatttccagcatccactacccatgaagaagaagcttcatcataagaagccaaatccgtagtgttcagtttcaaagtggcagtaacagtctcacctggcctcaattccttagttttggtaaaagctttaagttctttttccggtttgttcatctgaaaactattgggagcggagacataaagctgaacaacctctttccctgcaaacttaccaacattcttcacatcaatagaaacagtatatataccattatcaactttgacagacggattgacatactcgaatgttgtatacgaaagaccatagccgaaaggataagacacttgctttccgaaactatcgaaatagcgataaccgacaaaaatatcttcttcataatccgtatagtctacattcttcactgaagatcttttgtcctccttattcctcacatctgtattagccctagcatccataggaaaattggtcgaagaagcaacgtccatcaacttgttcgggaaagtcattgtcaacttacccgatggagataccttaccgctcaacacatccgtcacactatttccaccctcctgtcctgcctgccaagccagcaaaatagcatccggtagttttttccaagaagcagtttcgattacacctccgatattcaataccaccaccactttcttcccagcagcatggaaagcttggctgacggacttcagcagttgcaattcttcctcactcagttcaaaatcactgacattacggtctacaaattcaccggaagtacgtcccagcgtaaccaatgcaacatccgctttagcaacttgttctgacaacacctttgtagtagggataagttctgtcggacgaggtaccggcataaatctggagaaaggctgagacgagtcaggagtatttttcttattctcggcctcaatatactgttcataatcggccttcaatgcttcatctatctggtatccagcattcttcaaaccatccaataatgagactgtataggcacgattcacattacctgagccggtacctcctgctatgaaatcataggaagtacacccgaaaagagctatatttctgaccttcctttcaaatggcaaggtttcgttattattcttcaacaaaaccattccttcagtcgctgactggcgggtaactgctgcgtgcgccttcaaatcaggtttattggaatatttgtattctttaaaatgaggagtttggagaataagttcaagaacacgcttcacattacgattcagtatggattcatccaattttccggatttcaccccttcgataatcatatcatactggttagcccttcccggttggagcatatcattacctgctatcatctgagccacggcatccttccctccaaaccagtcagttaccaccataccctcgaaattccactcatcacgcaataaagtggacagcaagtctgtattctcagaagcataggtgccattaatatgattgtaagaggacattactgtccatggtgccgattccttcactgcaatttcgaaccccttcaaatagatttcccgtaaggcacgaggagtgatacgagcatcattagcattccgattggtttcctggttgttaacagcaaaatgtttgatggaagttcccactccgttgctctgtatccctctaacatatgcagcagctatcttgccagacaccaacgggtcttcggaataatattcaaaattacgcccgcacaaaggattccgatggatattcaaagcaggagccagtaaaacatccgcaccatattccaacacttcattaccaattgattttccaacttcctctaccaaatcctgattccaagtagaagcaagtaacgtaccgataggaaaatgtgtacaataataagtagcagaatccccttcgcggataggatctatacgtaaacctgcaggtccatcagccaacacaatggcaggaattcccaaacggggtatcggataagtagtacctgctgcaccgggaaccaacttctttgtagtgccaatcaccgtactgtcacccgaagtacccaccattccggtaccgataaccaaatgtgccttttcttccaaagtcatggcaccaataacatcctcaacagaatctttacccaattgaggagccgcagggccacaagcgctcaacacgcctgcagccaacagcaaataaaacagttgttttttcatagcctagtcagatttatttaaacaacttgggagcaaatacagagagataaatacgccagcaggtccatacatgtccaccaggagtttccataaactcatatttatatccttttttatccaaatcagcgcgataagctgcattgtttctataaagaaaatcgtctttaccgatacccaaccagtaaagtttgggagccttatcaaactgaacagctaactttttatccatatcctgataaaccggactatttttctgacctgcactctggacattaagggccgcagagaataaacctacatagtcgaacatatcaggatagttcaaagaaatattggcagaatgaaaaccacccattgaaagccccgcaatagcacgatgagctttgtccgcttgtacacgataattactttctacaaacgtgataatctcagggaaataggcttcaaaagcaccgtccatggttccattcttcatatggtaaggtttatagtatcccagactactctcacccggtgcagcctccatggcagcatgcccattgggcatcacgacaatcatcggttcagccttgccttgtgcaatcaaattatcgagaatctgtgcagcacgtccaaaagttgtccactcatcttcgtcccctcccataccatgcaataaatagagtaccggatacttcctatcaccggattgttcataacctgccggcgtgtagatattgatacggcgatccattttcataccatcagagtgataccaacgatgggccaatgttccatgaggtactttatttaccttatataaatctgccttaccattccctacaataaacacattgcttgtggtagcaaagtcacgatagacataaacattgttagggtctatagtcggcacaccatctaccatgaattcatagctataaagttctgaatccaacggcttggtagtataagtccaaattccttctgaattctttgtcatttctatcaaacctgctcccaccatacctccaatgtgttgtccctccgccttttcggcaaagtcacctgctatctgtaccctcttggcatcgggagccttgaagttaaaagtcactgtgttgtctttattcacgattgcagactcgaggtcctgcgcaacaaacaaattctgctgggcagacatttgcagtccacaagctgccataaatgcagccaatataatctttttcatttcagttcttcaaattaaagttcattgattcaagttcattctgccactgtaataatcagacggtgatagcggttcatctgtggcgtaccgttatccgtagcttccaaaatcaagtggatggtatcaccggggtcggcatcagccggaacagtaaaagctgtatttgcagaagtagggtcatctactgctactttgccccgatatgtaccggctgacacatattgccaccatttaatggcaagtacattcttgtccggatcggttactgtatatttaagtttcagcttttcacccggtttggcattcatggcaagtgcaccttttatcacaggttcatgatttgcatcagtatagcttggagtaactgaccatttaaaacgggcagccaatccattcattaccggagccgtaaaatcgggcaaaggatagtgctcggctctatacttcatctgttccatacgaggaagattcttcactgaatcgggaagaagagtccttccaccgcaccagccaccataagtaggattctcgtgaccacgcagaccattaccgatcaaattcagaaaacagtaagtgtcaccctcagccagataagcccctttcggctgaactccagtccaaactacatagccttgctccttcagttcatcaactgtatagcccgacaagccgaagaaatcgaacttatcatctttcaccatctgttttccatccccccagacacgatacatttcaccgaaaggccctttactacggatattctcctgcatccattccggagaatagaaaacctggttttctttggaagccctcaactgggcattataagccagcccgactgtcatgccgcccatctccatttgtctaagttccggccagaaaggtttgatataccgtgcatacgtatcatcctgatcaccagaaagggaaagaaccactttttttattatcttttcccgaatacctttccaggcatcagtatgctcataaatatcctgaatggacttcaaagcacgagctatggtgctggcacctccccaagcattgataaataccggatctgtacaatcatcaagcagtacggctttaatcagctccgatcccggagtatccttggaaatatcaccatcgaactctatattaccaatgcgtattttggatttcagatattcgggagtcggataagaaggatcatgtaccctcagattgggatatacctcctcataagcttccacagcatcgtcaatgaaacgttcttccggatcccaacgccaactttccataggcccgtagtctataccattacgagaatattcccgtccaggtacataccacttagtaccgtgcccgtcacctttccaatgaaactgactgctggcataaatcaaaccttccacgcggaaatccgtactgaaaagtaagaaacgtatcaaagagttcaggtcatcaagttccggatcacaagtaatgataacacgtggttttgacggatcttcactggacgtctgctgtccattcatacaagccggcatcacagccataaggcctgagaagaataagcatttaaatttattcatacactaaattttattgattaactaccaacccggattctgggtcatattcttattgacattcatttcagttgcagggaatgggagcaattcatgcttaccacttttgaaaccagcagaagcatttttctgttcattccaactgacacgaccgtctttataaagagccggtctttcctgtcctcttttggcaagtaccgtagcagcatcgccccaccgaatcaaatcctgataacgacaaccttccatccaaagttccagacgcttttctttcttgatatcatccatagaaacgctacccaatgcgggcaactgagcacgattacgcaccttatttacatagtcgacagctttacttgcatttccagactggagactcgcctcagcagcaagcaacaatacctcagcataccgcatagcacgagtattgttagggcaacgcaaccaataataattaatgacatccgcttcataaacacggtatttccaactaaagtaaccggcattgtcaggcatatacgcaatggcatcactcaaagatataccagtactttccatctgctggtatgtctttatggaagcattcaagcgatacgtatctcccatctcaacaaatgcatcatagctttccttggtcggattaaaaaatccccaacctccgtgagaatagatttgagtaggctcattaaatgcaagcatatctccgcgccaatgcacatatacccaaatcatgttactcataataccagtagcattattggcatcgtagacatagttactttcaaataagctttcgcaatttgcctctcctttagttgtctgaatattttcataatcactgtaaaggtcgtactttccgctattaatcacctcatccaaagcagtggcggcagcaccataattcttctggaatacatatgccttacctaacagagcttgtgcaaattgtttggtgatacgataggtaaagtcatccaaacttgtcttttcctccagatcaccactgttgacagcctcagtaaggtcttggttcaccaatgcccatagcgcctcagtatcaccattggcctgggaatattcatttggcgttaacggatgatccaccaatggcggagtcccccaaagactaattaattcgatgtaggacatcgcacggaaaacctttgcctctgcacgtgcacgaagtttaattaccgaatcatcccctacatactgcaaaacaatattggcggcataaattaccttataaagattcgtatacaacgttttaatatgagaaaaatcagagtcgaatgtataagtcgacagcaattgcgcactagcagctgtccaactctcccctgccgaatagcaatcatccgaaagaagattcttcagccagaatgcaggtgcataagtatccttccaattactatagcaggctataatggcttcttccgcatcagcatccgttttatagaaactttcaaaagtgcttactccatgctgcgagatatccagattgtctacacaagaggaaaagaaagtgcagctggcaagcaacaaacttgataaaatatattttgctttcatatttcgtattgaattaaagattaaaatgctacgttaagaccgaacacgactttcttgctggacggataagaacccatatccaaccccattgcactacctgtacttgtaaattcaggatcaaatccaggatacttggtaaatgtaaagaagtcgtctaaagaacaatacaaacgaaggttactcaaaccaatctgcttcaacaaattctttggtaaattataacccaactgtatctgcttgattttaaagtaagaaccgtcgaatacaaacttggagcttttcaagtacttatcataattactaggattggaacgggcatattttgcattgtctcctgcagttgtccaacgtccatcgtagaattccttcaaggtattcgctttcatacgggaagtacggttataaccggcaaacacatcattgccatgagaaccggaaccaaatatcgtcaaatcgaaacctttccatgcagcagtcaaagtaataccataagtaaagtcggggatggctgaacctatttccgtttggtcagcatctccaataatgccatcgtcattcatatccttaaatatcggatcacccgtttgtgaatcaatgcccgtacactcataaccacgcatgtaccaaatggggtgcccttcttcaaaataattcataacaccgatgcctgcacttgtcgtactctcaatgcgttccaaagtttcatgcagataagtaactttattctttaaagtagcaatatttccttttatgctatagttgaaatccttaatattatcacgccatgaaagttcaaactcaaatccgctgttcttgacatttcctgcattcataggtgaagtcgtgttacccacaatcagcgaaggagtaataccggttacaattaaatccttagtttttttctcataatagtcaaatccgaaactcaaccggtcgttcagcatccgaagatcaatacctaaatcaatttgttcagaagtttcccacttcaaatcatagttgcctgttgcggaaggcagtgaacccgtttcataagacacatctccggacattggataattgatttcagacagaattgtagcatcatacatatagtctgccaaaccagcaatactaccattctgtccccaacttgcacgtaatttcaaatgagaaatcgacttgagattctccataaacttctcattggaaagtacccagccaacagatacagccggaaaatagccccaacgtttctgcaaaggaagaatagacaagtcggcagcatccgcacgaagagtgaactgagcaaaatatttacccgcatagtcataagaagcccgaccaaagtaagaaagatttacatatttccttttctctccaccacttaccgtacgggtggcagtaccagtttggaacgcaaaataggcatagttgggatccaacttggtaatacctaaatcaaccttgtcaccagaacggctaccattgattcctcctgtcactccaaaagaggtattggaagaataagacataccaagcatcacatttacattgtgcttatctgcaaatgtcttagtgtagttagcaaagttttcccattgccaatacgttgtattagaacttgtagcatttaccgatacataatcctgataaaggtcagagcaggtaatgttaggcataacatagccgtaggaattactgtaagtataacggtatcccaaacgtgaagtgatgaccagctctttaatcggagtaaaatccagataagtggagccgctgaacacaaaaccatctcttttcgttgtaccgcggtcacgcatgatatacggattgatattattggagtcaccataaggggaaatagaataataatcaccattggcattctgaagcaaggtatgcccttggttcatataattaatcatagtgtcaggcagtttatccggtgtataggtaactggagtaagagggtcaagctgaatggcagacagcatcaaagaaccggttgctgagccttcgcttacagactgtacatgataacgggaaaatgaattgtttgtcgtgaacttcaaccaatcctttactttataatctgcattgacagtgccggtaatgcggtcaaaaacatccttattgccaacaatgggaccattattacttaaataagagagtgaggcgaataatgagccattatcattggcaccttggaaattgacattgtgacgctgcatcatggatgattcaaatgtctcttctatccaatcggtatttgtctttccatcccaatacctatctattgtttctctgggaataagattaccttcagtcatataattgacatattcctgagcattcagaatatcaggagtacgacctaaagactgggaggacaactggaaatcataagaaatacgacgaactcctttttttgccttccgggtggtaatcaagacaacaccattaccggcctgggcaccatagatagcagcagaagcagcatccttcaacacctccatactctcaatatcattcggatcgaggttactgatgtctttcgtacgcaaaccatcgaccacatacaaaggatctgaactggcattactgctatatccacggatacgaatggcgggattcgaaccaggagccgcagatgcagaaataatttgcacaccggctgttttaccctgcagggcctgctcagcattggttatggtacgattctcaaaatcttctgcttttacggaagaaattgcccccgttacagaacttttcttctgtacaccatatcctacaacaaccacttcatccaaagtcttgctatcttccttcagtataatattcatagtacctgcaacggctttcttttcctgagtcacatacccgatatacgaaaagacaatagtggaaccctcattcactgacaaagtataattgccatccaaatcagttataacaccatttgtcgttcctttttccaatacacttacaccaatcatcggttcattaagctcatcagtaattctgccagatacatttacttgtttctgtgcaaaaacagatgtcatacctaccaaaaggaacagcactaaggccattaaccttttctgtctaatttgtgttacaatcgttttcatttaatattattttgggttaacaatgaatttaaaatatcagtttgaaagagtaatcagtaccagccccacaacaaagagcacaaacatggttgcaatcataggtacagtcccctttggagcgcctttgaactccttccatacaaagaatccccaaatcatggctaccaccggtgcggcattactcaatgcataggctatagccggattggcagaaccagctcccataaagctgactaccataccactcatccaaataaaacctcccaacataccaatcagatgtgtacgggtgtcacctttcagataatccttcattgtcaccttgtttccctgagccggatgactcatagcaaacgtattaaagacaggagtcgtgataaggacaccggcagcaaaacaaaatacaccggtatagggagtcagtgttcccgtaccacccgttacatactgaggatctagtgattttacaaccaagccatagaagaacataatggccaaccccgctacaatagccaataagataccttttttaggagtagacgcctgacttgccgacatttttccataagccttgccacaaatgcagatggctatcacaataacagctactcctatccaaagcaatgtctggtttccagggtatacttcgccggccaaagatatcagtagataattaaaaattataccgcctatccaagctaagcctccaccaatgggaaaacctatcgacatcccggctacagcaatggctgctgtcagaaagatattaccgaaattccatacaataccgcctaggagcgcatacttcatactattccagtccattactgccaaatccccaaagaaagtacggccttcacctcccaagctacccaatgtcagggcacctaacagagctgtgaaaaataaaccgaaagtcaaatcccaatagaaaagctcaaaactccagcttttcgatgtcaccatcttctgcgtattcgcccaagaaccccaacagaggcaacaatagacacaacacagaatggctccaatatagttgtcaacaagtatcataatttattttctgttgtttaccgtgtgtttacctatttattcatgcacatatagattccaccccaaataaccctcgatggcctcattcagaatatcctttacatcattacgaaccatagccacatgatgttcaaaaccattcctgcaaatatgtttcatcaaaatctgtaagttatccactttggtaacagctatacatccatccattccgtacggatcatccgtgatttcaccagtacccaaataagccttgatagtacctttagtatcatcagtggaaatacggaagaatgtgaaatcacctttagtcactttgccatatacagcaccgaatgtattgaccttacctagcgtacgtcccagaacgccaagtgtaccaagctttaagtcatttctgacaaacgatttcgggaaattaccgcaatgagtacacacacatttattccggtcttccgcaaaattattgttccagtcaagtaatgccgattgaccttgcgctgccaatgtcaaagcatacatggatacagcaccggcaatatcaacctcacaagcggcaggtagtagtttttcacccagcatactcattgtcacacaagctgcacaaccatagttctgttccaaagagtcccaacactgaacagccacagcatcaatctgattggcttcaatccaccgttccacagccacgccaaactttgcctgaagcaccagcttgtcactgtattctttaggaactactgcataacacttaatctcttcaagtttcttcagcagttccacatctgtatcctcaatcttacgggcagcaccgagtatttcagaaagatcgactggaacgactgtaataccactcttctgcaacagtttttcactggcacgtaccgtctgaaaaccggctggtcgggcaccgatagccccgatacgtgcatggcgcaaaccattgaccacacgacagataccggcgaacttattaatatccttagccaatagttcagagtatatagaataggtatgcagcgtagtatctgtaaaaggaataccatattgatacaaattattgcaaacagaaattttaccacagaaagcatcacggcggctgtccaagtccaccttgtcattctcgtcgtcacaagcttgtaccaaaatgggaacattcaaatcagccacactgatagcattgattattccaatctcaaagccaaagttgggtaaagagactataatgccgtcaatacggtcacgattttgacggaacagttcggcacacttcaatccgtcttcacgggtttcaatactgctactgccagtaggagtagcatcttcaggtaaaattacatagtcatagccttcgtctgcaagtgttctcaacagctgtttgcgaacatctttggccaattctgaattaaaataagcacgggtgccgataattataccgaagcacattctttccttgtttttcatcgtaaatagttggtgttaaaattatacttagaagatatttatccgattaattgatttactgctttcagccagccttcacaccatttctccatcagtggtaagttgccctgcggttctattcggtagcggctccggcgtaatacggccacttgttcaaagctcgtccatatcttgcgggccattccattcatcacaacagctcccaaagccgaggcctcctcaacatccgaacaattgatcggtacacgtaaacagtcagcctggaactgcattaaaaatttattttttgtaggtcctccgtcaaccctgatttctttcagttttatacctgcctgagtggtcatcgctttgactaaatcattgacttgataagctatggattcaagcgccgccctaagaacatgtggctttccggtacctaaagtcatccctaaaatggccgcctttatatccccttgccaccaaggagcacccagtccggcaaaagccggtacaacatatacacctccattgtcttccacagtaacggccagttcttctgcttcatcgggcgaaccgatcatctgcaatctctgttccaaccacttgatagtaccgccagtacaatggatattcccctcaaaagcatagaacactttcccaagtgcggcaaaacctatggaagtgaccaatccccgaggagctgtagcaaccttttcgccaatattcaccattactgaggagccggtaccataagtgaccttacctaatccctcttcaaaacacatctgcccagtcagtgccccatgcgaatcgcccaatacaccggcaatgacaatagggttcttgaacagtccacccaccgtagtctttccaaaaacagcatcacaaggcaacaactcgggcatcatggttttgggtatggtgaacaattccagcaagtcattatcccatagcatcgtatgaatattcaataaaagggttctggaagcattcgtataatccgtcacatggcgtttaccatcagtcaacttccaaatcagccacgtatcaatagtccccatcaataagtctccattatcagcagcccgacgggctccctccacattgtcaagtatccacttcacaccgctcgccgagaaataggggtctaacaacaagccacttcttacctgtacaaactcactgtatcctctatttttcaagtcattacagatatcagcaccacgcatacattgccataccacagcattgtataccggtttacccgtatgtttattccatacaaccaccgtctcgcgttgattagtgatagccaacgaatacatattgtctgccgtttcctcttcaatcaactcagcaatgcttttcagcacattccgataaatttcttcaacatcatgctccacccatccagttcggggataatattgctcgtgagtgacattgacacgcttcagcatttcacacctctcattgaacagcatagccttggtggccgaggtgctttggtctattgcaattatcaagtttttcattttaggtattattaaaggctgattatttcttacttaaggaagtcaagggtagttttcacgataccaggtgcatccaacccataatgggcaaaaatttcggaagaactcccatgcaccacattctcgtcaggaatccccaaaattttcacgggtacgggattttcggaaatgatttcagtcaccatcgctccaaggcctccatactgactatgctcctcaaccgtgataatacgaccggtttcagaagcagctttcaaaacagcctcctcatcacaaggtttaataaaggacatatccagtacccggactgaaataccatatttacgcaactccaaagccgcttgatgtgcatggtatacggtttcaccggttccaatgattgtcaagtcggtcccgtccaataacctatttgccttacctatggcaaaatcaaaatcatcgttctcatagacatcaggaactgctgcacgtcctacacgaacataaaccggttcaggatagtcaatcaaaaactcaaccagtttttttgtctgtcgggcatcacaaggcaacacaatattcataccggggaaagtacgtaacacggcaatatcatgcaagctatgatgggtagcccccaaagctccgtaagctactcctccacttactcccaatatctttacgttgttctgactataagccaagtcaacctttacctgttccagactgcgagccacataaaaacatgccgggccacacacaaacactttctttccgctatgagccaacccggctgaaatacccacagcatcctgctccgcaataccacactccacgaattgctgtggcaattctttggcaaaatcatttaacgtcaccgaaccacgtgcatccgttgtcacagcaatgatatctttgtccatccgggccaatgacaacaaagtgtcggtgaaactttttctgcaagctatcatatcaattctaaattttttatcctttctgaaatttcccgaatagccagttcatactgctcgttgttcggaaccccatgatgccatttggccactccctccataaaagacactcccttgccttttgttgtatgagccaccagcaaatgaggatggtgatttgcataatcaatggaacggaaagtccggataatgtcttccatatcgtcaccattcatatcctttacctcccaaccaaatgccgtccaacggtcacggatgtcatcaatccccatcacatcttccgtatctccactaatctgcaaatgattacgatctattacagctaccagattatccagcttgtactgccgggcagccattgcagcctcgtatatggaaccttcaccctgctcaccgtctcccatcagcacataggttttataattcctcttatccattttagcagccatggctatacccaccccgacagacaagccatgccccaaggctccagtattcacttcaatacccggaactccgatagtggggtgccccgaaagaatggaaccatattgccccaatgtgtccaaaatgcctttagccatgaaccctctggattccagcgtcacatacaaagcctccacacaatgtcccttactcaaaatgaaacgatcccgcaaattatccttagggttacctgcatctacattcatcacatcaaagtaaagagcagtaagaacattgaggcaagacaagtctccaccgatatgtccggcttttgctttatagataatttcaattaatctttttcgatttctttctgattgaagaattaattcttttgttttcatagcttatacactttcgtttcctttgcaaataaaacaaaagaaaagtataaatcgaaagaaaacgaaagattttcaccttatgttaacatattttacgattaacaagaagggaaaagcaaataaataaaatataaaacaaaagcaatcgataaaataaaagataattattagaataaaaaagaagaaaaacagtaaaaacgaactttcatttgactttttttgactacctttgcgaaaaaattaaatgattgcacaatgctcaatactatagacgaaggaatcaaagcggttcggcaaggaaaaatagtgatagttgtcgacgatgaaaatagagaaaatgaaggggattttatcgtatccggcgaaaaaatcacccctgatattgtcaatttcatgattacacatggaagagggcttctttgtgtaccattacctcgttcccgttgtgaagagcttcaactatacccgatgtcggaagacaacacttctcttttgggcactccgttcaccatgtctgtcgacctgaagggctacggctgtacaacgggggtttctgcctatgaccgttctgctaccatacgcgctttggttactggcaatataaaaccatcggaattggcacgtcccggacatatttttcctctctacggacatgagaatggagtattaggacgcgacggacatacagaagccttgctagacctgacaagaatggcaggattgacacccggtggcgccctcattgagatactgaaccaggatggaacaatggctcgtttgcctcaattacttgaaatagcagaaaagttccagctgaaaattatagctatcaaagatatccaagagtatcgcaggaacaacaagatataacaatatataaagtagatatggcactaaaccaaagaagagtcaagattttggacctaatccgcgaagacggacatgcaaaagttcaagaattaagcaggattttcaatgttacggatgttacaatcagacaagacttggaagcccttgaaaaattagggtatatccaaagagaacatggtggagctttcctaaaagacgtaggctcatttgcaaaaaccggaaaggtcttcaaccaaaaccatattgaagaaaaaagagaaatagcccgaaaagcggtatcgtttatccgcgaaggcgaatgcatcattctcgattcaggttccaccactacagaaatagccaaactacttacgcaatacaaagagctcactgtcatcaccaatgcactgaacatagcgttgatattgggcgaaaatcccggtatcaccctcatcgtgacgggaggagagttcaaagcgcctaccctttcactgaccggaaagatggcagccgactcactcaaaggtttccatgccaacaaattattcctcgccacagcaggaatatctccggacatgagcctgacttatccaagcctcagcgacctgatggtaaaatcggccatgataaaggctgccgaagaagtcatcctggtagccgattcttccaaaatcgggataagcgcattcgcaagtttagggtcgataactatggtgaactccttcatcacagacaatcatatctcgaaagagaatattgagaaaatgaaggggaaaaacataaatctcctgattggataattgaaaggaaaaaagagacccggccctcgtacccatttatattatattacaaatataagtacaatctgcctgcattcccatgccttttcatctcactcactgaacgaaccggattcagtcagggactgaaagcctttcactcagggactgaatgccattcagtccttgagtcattgcaccccctctcagaaggtatcaggaaggaggtatagcaaaccacccaccccgtaaaaacaagcaataaaattataggacatcctcctctgaaagccgatatgcttccctgaccacttcctgcggatagccgcacatctcgataatccggatggcattacgttccgtcaccggtcccggcttcaacttataatcaaaagacaatgtattgtcggcaacacactcacaaaaatgaaacaattcatattcgtcctcaagtaaggaagccagttcgacatcgtgagtggaagcaaacacaatactgttcttgtgcgccaaagcagacagcacagctttggctatagctatccgttccaccgtattcgtccccttgaacaactcgtccagcaggaaaaaccgccaacactcctttccggcttccagcatctctcgaacaatttgcacctcctgcagaaagaaactttttccctccatcagactatcctccagatggatagcagaatataacgcagtatccataggaaaacggaaactgcgagcaaaacaagtatggagcacttgtgcggaaagcaggttaagtccgatggcacggataaaagttgtcttaccggacatattggagccggtaacaaggacagatttgccacagagtgtaatgtcattagggatacaacgttctataagcggatgataaagcccttctgcatgaaacgtttcaccctcgctgcaagcttccggtaaaacataataaggcagcccattccggagttcggaaacagagcaaagcacatccaccaatccgaaatagcggaaaacctcttcaatctgttcctgtctaccctgcaatagaaagaaagccttggaaaccggaataacttcccgcagaaaaaacacattcactatctcggtgaagaaataagcgaaaatggcgatgtcgctctccagtctgatactgaaacggaaagtggaaagtttctttcgcaacggatgcaatgcctgcaaagtcttttggatatcccgatgcacggatgcacacaacggaatctgtgccaacttctccgcttgcctgagcaactgccataactgaggaatggaaaagaaatagccctgaatccgcgccttgctgcgatagtgcagtaccatgttcaccaataccgatgtgcacaaaatccccaaaacataaagcgaagacgtaatgtaaactattcccaacaaaacaaaaggcgcgaattgcaagatagtcagcaaacggtaaaagcggcgggaatacacgggatgggaaatggagaatagcgatgcaatggtataagcatccggcgtatccagtttccgcaactccgaccggatttctgcacgcaactccttgtcagcagaaagcttacgaatcacttcctcttgttccgaaatctccgaaagacggttgtaatgcaacacgtcgtagaggtactgtcggcccacacaagaagaggtacggtcagcccattcgaaaaaatcatccagattgaggtcatcccaggttttctgcgacaccaaatgttctatctccctcgccgaccggtactcgtggtatagcgatatatccgaaaatgactgttccatcaaagaattatttggaatgatgcacaaaaataatgaaaagattgcattctatctaatttccttgctgctttccctatattatgtttactttgcggatacaaacacttttcattacttcaccattaaaattataacaagatgaaacacacttttttcacattgacactgtttttactggccttactgtcaacatcatgcggaaacaagaaagtagcatatcagaatcccctgcccatggccttcggagacccgttcctactgaaagcttccgacggcaaatactatatgtacggaacgggcggagtatcgaacggttttaaagtatactcctccgatgacctggtgacatggacagacgagggtcccatctatcaaggcggcacctccgactcatgggccaccgactgtttctgggcacccgaagtgtatgaacgggacggcaaatactacctatggttcagcgccaactggaaggaaaatcccactaaggagcaagagaacttccgtatcggtgtagccgtagccgataagcctaccggccctttcaaagagctgttcaaccaaccggtattcgaccccggctatcctatcatcgacgcaaacatactctttgacgatgcttccggaaagacctacctctactactcccgctgctgctacaaacatgccgttgacagcgaagtttcaacatgggccaaagaaaagggctggtttgacgagattgaggaaagttggatttacggcgtggaactgaaaccagatttctccggtatcatcggagaaccggtagcactgctttgcccgccccagacaatggacgaccctcaagcggaatgggagaaccgctcggtgacttcacatgaagtcaacagacgctggacagaaggttcgtatatcgtgaagcacaaaaatctttactatatgctgtactctgcaaactttttcggagggaaaaattatgcggtgggttatgctacctcccagaaccccttaggaccattcacaaaagctgccaacaatccggtgctgcaaaaggatacagagcaaggcggcatcgtgaccggaaccgggcattgtatgctcatcgatattcacaaccgcctctactgtgtctatcatggacgcaccgaaaccactggtgacgaacgaatggtattcatcgaccccatagacatccaaccggacgggaaactggtagtccacggaccgaatacggatttacagaaaatcacatattaaagccatcaggcgcagactgcacagcatgtcacggttcattattctccgtggttcttcctatgcattccgcgcctgatgaaaatcaaaaaggacatatccatacacaatagtccgttccatatttgttcctgacctcaattctattctcaccggtatccaatacaatgcctttccattccagtacatttacggaatccggctttgcagccccatacgctttgccattgacgtacaactcggcagccccgccattgctgaatacttgcacatcaacgattttgcgggttctgtttaccaatcgttttcctgcgatatatacaaacttatcttcttgattccagtttgccttatataaagtaaaaggcatctttctttattctccggtcgtaagtcaccagtcccttgtcgttgcgtcccataatggagccctccctacggtctgccgccgaaaagtcgaacatgcaccagatgaagttgcaccacaagaattcgcgttcctgaagctgtttccaattctccacatgataataagtctgccagttctcgggatgccattgtccccacggttccggatgcttcagcgagtctgcctgctgaaatacacatgccccggcaccatactcgctgatgcccatcttccgctccggatgcgccacatgctcgcggtctatccagcgccccatgtcatccatgttgttgccataccagccgaaatacttgttgaaagcaatcaagtcagtgaatccgttgaagtcgtcgtcctgattgctggctcccatagtgggacggctcgggccagccgacgggccaaagcatgaagctccgccaccatgcgcgaaggacggtccagcctaccggaatttatctcattgaacagcccccagaacaaaatgcaggggtgattgtagttctgtaaaatcagttccttcaattgcaagcgcaagttttcatcataagcaggattattcacataaacattggtaaaaggaatctcaacccatgccaccagtcctcgcttgtccatctgtcgatgcatgtattttgcttgcagatagtggcaaagccgcacggcattgcatcccatttcctgcatcaagtccaaatcttcatcatggtcctgcggataaaatgccgaagcgcgttccgccctgtcctgatgccggttcacgccattcaagcgataaggccttccattcagaaagaaacctttctccgcatcggcatgaaagtagcggaaacctatctctttttcgcggcggtctatctcttccccatccttacgcaatatcaccacgcctttatataaatagggacccttcactccatcccacaaatgaggcctttcaagcactatgtccatcatcacctttttatccgcatccacctccgtactggcaacacggcgaagcaacttctccttgtcatatagttgaaactccacctcgcaaccggtcacagcagtttcctttgccgaaagcagtgtttcaattttcaaacgggcctttttctccgataccatcggactgagtgaagaatacacctgaagaagcataataggcaggttctatgcagacatcctccgtcaccagcagtccacccccccaatacaacccaccaaacatattgaagtcgccgcaaatgggagcgacatccatggtctgagcattgccgacacgaatttccaacacactttctgtgcccggaaccaggaaatcggtcaattctgccacaaatgctgtataacctcctttatgctgcatcacaaaatgacggtcgacaaagatgtcggcaactgtctgtgcggccatcactttcaagaaaaaacgtttcccccgataatgggcaggaacagacaacttacgactgtaattgcataatccccggtaataatcggtattaccaaacatgccatcggccgcattccaagtgtgaggtaaagccaccttcactgtttccgaagcaggtgcctgaaaaccccggtgaaaattccatccttcattctgtggaatcacctctacggcaaacacacatgttgacaatattcctaaagaaaataaaaataaaatgatgaatctgttcattttcgataaagtattagaaggttaatcatattggcaggagccattccttccttgcaaaggaatgaaataaatattgaataataaatgagaaaaacacttcaagacacgcaagacaacaaacggatggcatgtttaagacttatacgaccgcgatgcaacattacagacctattaatgcaacatatttacgtttatttaaataagatattgctatctttgagaattcaatttcagattatatagtatgtcttttacaaactatttacacaaattagcgttccccctcattcttctgttactggcttatctaccgttagcaggacaaactccgtatgtatttcgccatttgaaagtagaaaacgggctttcaaacaataacgtaaaaaccatattgaaagacagtgaaggctttttatggataggaaccgccaatggattgaaccgatacgacggatatagctttaaagtgtatcagcccaaagaaaaagacatccattctttattgtctaacgacatctggaacttacaggaagacggttggggcaatttgtggattggaagcgaggcaagatattgtatatacgaccgggacaaagacaacttcattaccgatattccctcatacctccttaaaataggcatccagataaatggtacctacaaagtacatgttgacaaaaaacacaatttatgggtactgcaaggccaaaatgctttttacttcaatttttctcataaagtccttcaaacattcaaaatagaaaactttccagaagaaactccggaactgagtatcagtgatgatggtgaaaacctgtatcttctttggaattcaaccttattgaaagtaggaaacaacgcaaaaaaatataaacgggtagatagtatcagcttaccctccaactctattatcgaaaagcatatatacattgattatcatggaggcatctggctgtattcatataccgatgaacaaatattctataagaaaaacataaaatcggaatggaaccaaatcaatctccattctaaaatagagacaaaaagtaatgcagtaaggagcatactggatgactcaaacggacatgtctggataggaacggaccataaaggagtattcatttacgactacgtaaatgacaaccttgtcaaccttctgaacaaccctatgtcttccacatcccttgcttccaacagaataaatgcaatctaccgtgatgattcaggtgtcatttggttaggaaatttcaaaaaaggagtttcttattatcacgaaagcttctatgaatttattgatacccagcataaagaatgcggtgacatagcctccattttagaggataaggccggaaacatttggctaggaacagatggaaacggactttatgtgaaagaaaaacaaaaaggatttgccattcgcaaactatccatccccgacatagccatcatcagtcttctcgaagacaataaaggacgtatttgggcaggaagctatcaagacggattgttctgctatgagaacaacagtattcgccattttactccagagaacagccaactgccatacagtggcgtatggagcatgaaggaagaccgatatggaaacttatggataggctacgtactgggaactttgacttgttttaatccggacgcgaatactgcgacaagttatctactgcctgacgggaataacatcaatgtactcaatatctattatgactatggagacaaaatgtatatcgggactacatacggactctgtgtaatggacatcgtgacgagaaagcccgaaatgatttatgccaatcgaaaagagacacagccattcaagcaattcttcatctcctccgtattcaaggacgacagagatatattgtggttagcccataaacaaggattgaccgcctgggacttaaaaaatgattcactgtactggttcaacgtaaccaacggattgtgcgacaatctcattaatagtataactcaagacaatcacggtaacatgtggcttgcaacaagtaacggattgtctatactggaagtaacgccggacacccagaaaggattagacttttctttcaagaatctttctaccagagacggactgtcagaaaatcatttcaactcccattcctcttgtaaattgtccagcggagatttgctgctgggaggcaccagtggctatacatccataaatccgaacaaactgaccgaaaagagccgaccgctggcaaaggtgtattttacgaatctgaccattggcaatcaacatatagaagtagactcaatatatgaaggacgcaaactattaacaactgtacttggcagaaccccatcattggctgtcaaatatgacgattatttaatctccatcgaatttgctgcaggcgatctgttgaatgctgataaaataagatatgcctataaactggaaggattaaatacccaatggtactatacaaacgaaaacaaggtggctttcaccacccttcctcctggtaattacaaactattaatcaaagcctgtaacagtgacggtatatggaatgacgaagctagcgagttgaatataaccgtttcatctccaatatatttatgtaatgttgccatcatcttgtacatattgtttgccattggcataatatcctatgtaatataccgattaaaaaagcatcattacataagactggaacaacaacgagcaaaactggagcaagaacaaaagttgcttctgaatgagatgaagctaaagttctttacaaatataagccatgatttacgtacaccactgacacttatcatcagcccgttacaaatgttattatcagaacccctggataacggaatacgcaaaaagctaaatacaatcaataaaaatgcacaacaattacttacatcgataaactctctgcttgatttccggaaactggatgtaggagccgagacagctcattacaaatcgggagatattgtcaactttatccgcgagatttgcagtacttttcaagagtatgctcttgaccataccatcagcttctgtttcatgtgcgaagtagaaaacctgaacatgtccttcgatccggttaaaataaaaaaagtaatgaacaacttgttgtccaatgccttcaaatacactcctgataaaggagaaatcaatgtacatctttatcgcgaagatgacaatgtatgcatctgtgtggcagacaacggacaaggtatcatagacaaagacaagaaacatatcttcgaacgtttttatcaggtgcaacaaacttcggaaaaaaccggcagtggaatcggcctgcatattgcaaacgaatatgtacatctacacaaaggaacaatctccgtcacggacaattttcctaaaggttccgtatttaccgttaaattgcctatcgtcacatatgccagtgaaaaggaggaattacttccggaactgctaaacaatgacaaagctccgaatgaacttcccgttccaaatgcggaagaattgcggtataccatcttgttggtggacgacaacaaggatttctgtagtttcatgtctgaatacctgtccgatgaatacgccatacaggttgcctacaatggagcagaggcattgaagatattagaaaaaaacagcgtcaatattgtaataagcgacatcatgatgccagtgatgaatggaacagagctatgtcggcaaatcaaaacaaacatgcaatggtcccacattcccgttatattgcttacagcccgtatggcagaagaatacaaaagtgaaggatttgagcaaggagccgatgactatatcgtaaagccttttgacttcaaattactaaagctgcgcatcaggaaatttattgaatggacagaaaaaagccatcgtaaattcagtcagaaaatagaagtgacacctaatgaaataacaatcactccactagacgaacaatttattgaaaaagctatcaaaatagtagaagagcgcatgagtgattccgacttctctgtggaaatgttaggagcagaattggggttgagtcgtagccatctctacaaaaagctgatgtgtatcaccggtaaaggtccggcagaattcatccggattatccgtttgaagcgcagtaagcaacttctaaaagaaagccagaaacaaattgcagaaattgcctatgaggtaggattcagttctccaaaaaggttcactgtaaacttcaagaatgaatttggaatatcaccatctgattacatccgcagtctaaaatgataacttgaaacataaaggtatgttatttgagacatgatagacctatgctattatgataactttccatatttgcagtagcttttgataacagctatttttaaattttaaattaaagtattatgaagttacacgcaaatgtatgctctcaatgggaatggacaaaattgagacaattgcttgttatcgtgttactaggtttgggtattgtttccacgtatggacaaaccaaaacagtatccggtatcgttaaatcagaatcgggcggtgagccacttgtaggagccaccgtcaaagtgaaagaaaccaatacgggcggcattaccgacatcgacggccgttacaccatccaggcaaatctgggacaaacattgatagtctcttacatcggctaccgcaccaaagaggtgaaagtagaacgcaccacccgcatcgacatactgctgcaagaagacaatgagatgctggacgaagtagtagtagtgggatacggtacgatgaaacgcagtgacctgaccggttccgtagtcagcgtgacgggtgacgaactgaaaaagtccgtagtcacctcgctcgaccaagctttgcaaggacgtgccgccggtgtgcaggtgacccagaattccggaactccgggtggcggtatctcggtcagcatccgtggtatcaactccttgaacggcaacgaaccgctctacgttatcgacggtgtagccatctcaggcaacaacaccagcaacaacagcgtgctcagttccatcaaccctgcagacatcgtttccatggaagtattgaaagatgcatcggccacagccatctatggtagccgcgcctccaacggtgtagtactcatcaccacccgtcagggcgaagagggcaaaacaaaggtctcctacgaaggttactatgccttgcaacagcttcccaagaaactggaaacactgacactccccgaatatgccgtttaccagaacctccgcgccgccaccatcggcttcggcgcacgcgaagagttcaaagacccctcactcctcagccgcggtaccgactggcagaatgaaatcttccgcactgccccgatgcacaaccatcagataaacatctccggaggctcgaagagcatgaaatactcgctatcaggcggctacatgaagcaagacggtattgtattcggttcggacttcgagcgtttctctttccgtgtcaacatggacaacgacatcaacaagtggctcaccactggcttgcgtgcctccgtagcccgtacacagcagaccaacaacgtggacggttcgggtgccatctacaatgccctgaaccagctccccgaagtgcctgcccgcaacccagacggcagtttcggtatgcagacggagaacatgtatggaacttacttctccaaccccctctccgaccttatccaaaacgaaaactatagtcgcagcacacaagtctatgtcaacgcctttgccgacatcaagctgtggaaaggactcgtattccgtacggaatatgccgccaacttcaattacagcaacgactataagtttaccccctcctacgactacgagcacttcaagcagcagtcgtcagcaagccgtggagccggcaacggaagcaactggacattgaaaacttactttacttataataataccttcggcaaacacggcctctctgccatgctgggacacgaagcgcaagaaaataagtacgagtcgctgagcggcagtcgtaccaacttcctcttcaactccgtacacgaactggatgcgggcgatgccacaacagcaaaagccaacagttcccgtggttcatccgccatcgaatcatacttcggccgtctgaactacaactacaacgaccgctacttgctgaccgctacgctccgtgccgacggttcgtcttcgtttgccaaagaaagtcgttggggttggttcccttcggtagcattggcttggaaagtcaataacgaagctttcctcaaagatgtggaagccatcaactcactgaaactccgcttgggttggggtgtggtaggcaaccaatgggcaggttcctatgcctatggcgtcaccatggcttcggcagcctccatctggggcactggtttctatgcaggcaactatcctaatcgtgaactgaagtgggaagaaacaaactccttcaatgtaggactcgacctcgccctcttcaacaaccgcatagagttcattgccgatgcttattacaagaaaacggacaatctgctgatgcaagcttctcttcctacctacgtaagcggtctgattcgtgcaccatgggtcaatgccggtgctatgaccaataaaggtgtggaatttaccctaaacacgcacaacatccagacacgtgatttcacctggacctcaggactcaccttctccatcaaccgcaacgaagtgacgaaactctactccgaatcatccgctatttcgggaatcaacggttcggaaacactgacctacaccatggtgggcgaaccggtcgggcagttctacggctataaagtaatcggtatgttcaaggaagaaggagatttctacaagaaaggtgccgacggcaacttcctgctcgacgaaacgggcaaccgcatccaagtagccatcccgaaggaccagaccatcggcaaatcgggcatctgggtaggtgactacatctatgaagaccgcgacaacaacggtgtaattgatgagaaagaccgcacattcctcggcaatccggcacccaaattcacgttcggcttcaacaactacctttcttataagggatttgacctcaacatcttcctgaacggctcggtgggcaacaaggccatcaacctgattcgccgcaccttcaccgaccccatgcgtaacagtaacctgctgaaagaagctaccgacattgccctaatcgccatgtacgaccccgaagtcggcgacgaggtactttccaatgtttacgtggccaacgccgatgcagccaaagtacaacgcatcactaccagtagcgccaacgacaacaaccgtatctccgaccgctttgtggaagacgcttcctatctccgcataaagaacatctcgctgggatacaccttcccacagaaatggttgcgccatttgcagatagaccatctgcgcctctacgtcaacatccagaacctctgtaccatcacaggctacaaaggctacgatcccgaaataggcgccttgaactacaatgtattgctacgtggtgtggacgatgcgcgctatccttcgcaacgtatctatacatttggtcttaacttcaatttctaatgggcctaacaaatcatttatcatttaaaatctcaatatagttatgaaacacagatttttaacccttatatcatcgctccttctgctcacagcatgtagcgactcatttctggaacgtgctcccgaaggaaactatgtagatgtgacatactacacttccgacaatgcactcgaacaagccactgcaccactttacaaccgtgcatggttcgacctcaactcccgcgctatcgtaccgctgggcagtaaccgtgccaacgacaacttcagtcgctggggagctcccgagttcaccaacttcaaggtaacagccttaagtgaaaaccttgccaacgcatggacaggtttctactcggtcattacaatggccaatgccgttatcagtgatgtgcagaccaaatgtagcaacagcgtaagcgaacgtgccaagcgtacagccattgccgaagcccgcctgatgcgtgcttgtgcctacttctacatggtccgcctctggggaccggttatcatcatcgaagacaacgacaaagtggttgccaatcccatgcaaccactccaccgcgaagaagatgtactggaactcgttattcgtgacctcacttatgcaaccgaaaatcttcctgaagtggcaaccgccaaaggacgtgccagcgcatggggggcaaaaggcatgcttgccaaagtctacctcgcccgctcaggctggaaaggaggcgcacgcgacaacgctgacctggagaaagccaaggaactggccgccgacgtgataaacaatagcggcatcagcctttacgaaaactatgaagacctcttcaagtataagcacaacaacaatcctgaatcgctcattgccatgcagtgggtgccactgggtgattggggcgtatgcaacactctacttgccgacctcgccggcaacagcgagatgaccggcggtgtaaacgtatggagcagctatcaggcaagtatcgatatgctccagcaatatgagttgggcgacactatccgccgcaatgccaccttctgcacaccgggtacatactattcatacatctgcattgccgacggaggctatacatacgatggcaacacctcttgcattaaaaaaggtgtaccgggcggtccggacgacgacaacgacggttatgtccagtccatgaactctcctctcaacacctacatcctacgccttgccgatgtttacctgacctatgccgaagcttgtctgggcaacagcgaagaactgactggaggccccggcctggaagcattgaaccaggtacgcgaccgtgcacgtatccctcgcaaggaacgcgtaaccttcgaagacatcattcgcgaacgccgcgtagagttctcgatggagtattgtaactggtatgacatggtatcgtggtatcactggaaacccgactacatgctgaattacttccagaaccaacaccgcggctatacagtagacctcatcgtgaaggacgaagacggttaccttcacttcggcaagaaagaaggcgacactttcctcgaaggcatagaaaattggcaggaaccgggcgagaatatcgaaatccaccacggcaacatcctgatgccttatccggaaagcgatgtcatccagaatccgctactgaacgaagaaccggtagcatacgaattcagtgaataaaccaagttatacattcattatctcaaataacgactttaatatgaaatatatacattttccttttgtgttgctcaccatcctattggcatgcaatcttttcactgcctgcaacgatgatgagggcggtggtgttcccgtaatccaccacatccgtcttatcgatcccgagaaagctgacagtacgtttaccgatgtaaatccgggcaccatgattgtagtcatcggagagaatctgaacgatgtgaagaaagtatttatcaacgaacaagaaatttcgttcaacagcaactacggaacttccactaacctgatacttaccattcccagcgaattgcaactgacaggtgccaatccggaactgaaaggcgaactgcgtatcgagacctcgcacggcattgccacgtactccatgcatgtgctctcgcccgcaccctacatcacccgtgtagccacaaccttccccgtggaggcgggtacgcctctgcgcatcgtgggcggtaacttctacgaaattcagcgtgtctatttcaccactgccgtggacgacatcaccgatgcacctgtttcagtagaagtgactgactacacagttaatagagacttcaccgagatttcattcaatgctcccgcaggcctgattgatgaaggcagcctggtagtggagtgctataccgcatccgcattcactcccttccgtcgcacagccctcccgccgagtatcagcaaggtaagctccatgatgcctatcacgggtactacagttaccatactgggacagaatttcatggatatcgcctccatcacaatgggtaaccgctcggtagacctctctactgtaaccgtaagcgaagccaatgatatgcttaccttcaccatgccgcgtgcacctcaaggcacttgctcactcgccatcaccaccatgggcggcactgccgaagttccgggcttttatcctttggagaatgttgtattgaactatgacaacatcggttggttctcctggggcggacaagctgcacccatcacagccgacggcacggcagctcctttcttctcggatggtaaatgctacagcatatcaggcgaactttcagcatggaactactggtggggccaattgcagaacggtgccgtatggggcatcgacgcagccttcctgcctactaatacaccgacttccgaactggctttgcaattcgaatgtttcgtagcagtagaatatggtgaaggtcctgtcttccgcatctacctaaaagggaatgaggctcacaactacacgaactatcgtccggtgagtgatttcaccgggaaaaccgaagtaggtcaatggatgcagtgcagcattccactttccgaactggtagacgaagccacttggagcgagttccaaaaacgtgacggtgacgagttggcactccagatgacaaaccctagcgaaaatggtccgtacaacatcgaaatgtattttgataatttccgagttgtcaagatacaataattcaataatttgaattaaaatcgggcacgggattacacaaagtgacaccttcttttaaactcttagacgctgattcaattgaatcagcgtctaaaaataaatacaccgaaattattaaaacgaaaattcaccgataccatgacacaaatcttcaagaaaaccttattaaccagtctggttctatttctgatgacagcttgctctgacgataaaaaagaactgaaaatcatcgtagaacctacctccttccattttgaacaaacgggaggtagcaggaaattcggtatcacacccaataaaccagccactttccaaagttcggaagcatggtgcaaagtaacctcggaaagcagcactcccgtacaagcaatctataacataaccgtagaacccaacaccacgcccgacgtgcgcaacgccaccatcaccgtcagcgtaaaggagcacgtacaagaaatcaacgtggagcaggcagcctatatccaaagcgatgaaccggaaaaatacactgtacgcgagaacctcacgactcaccaactgattaacgaaatgggactgggcatcaacctgggcaacacgctggatgctgtaggcgactggatagacccaagcagcattctcaattacgaacaagcatggggaagtcccgttatcacacaagaaatcattgaaggatatgccaaagcgggctactcatccctgcgtataccggtcagctggggcaatctgctgtccgacgacttcaaggtgcatcccgacctgatggaccgcgtagagaaaatcctgaactggaccctcgactgtggtatggtggctatcatcaatatccaccacgaaaacgaatggattaaacaagtacccaccgacagcaaagcaaaagaaaaattcacttccatctggaaacagatatgcgaacgcttcgagaagtacggcgaccatttattgttcgagccaatgaatgaaatcgggtacgatgaaatttggaccccgtggagcggtagtgaagccgacaaggcaaaggcactgggatacgtgaacgacctcaaccagctctttgtcgacatagtaagaaacagcggcggtaacaacgccaaacgtcatctgttggtggaaatctacaacaccaacttggagtatgcctacgatcccttgttcaagatgccgaacgatcccgccaatcgacttgctcttactgtgcattactatactcccgcagactttgccatactgggtggaggtgaggttgtcgactggggtgtaggccgagaaagctggggaacggaagctgacttcaaggaactgaacgacaatatggacctactaaagaagaattgcgtagacaaaggaatccccgtcatcgtaggcgaatattgcgccgagtccaaaaacagaacaaaggaagtgataaggctcttctgtgtttctgtaaccgaggccatctactcgcgcggtatgtgcccgatgctctgggacactccggggggacaatacaaccgacagacttgccagtttgacgatcctctcttcttagaagagatgatggctattcctgctaaatatcaacggaattaagtaaagattgataatcaataataaaataaaaaatgaaaagaatcagcagttgtttcgctagcctattgctttcttgtgcgttgactgcacaagcacagcaatatcaactgaattcaccggacgggaaactaattgtcaacatcgaagccggaaaaagcctcaactgggcgattgcccacgacggtactaccgttctcttgccttcggatattgctatgcaatgcacggaagctgagggaaagcccattgctttcaccttcggcaaagatgtgaaggtgaccaaagctacccgcacttccgtcgacacttccttccccactcctttctacaaaaaggcgagtgtgaaggacacttataaccaactcactctgaaatgccgtaacggctatagcatacagttccgcgcctacgacgacggagccgcctatcgttttgtttccgaactgcgcaaacctttctgcgtgaaggacgagattgccgagttcaacttcgaccgcgattaccacgctttcgtgccctatattaacgacaatcgcgccggcgagcgttactgctactccttcgagtcctactacgatgaggcccccctctctcgcatgtacaaagactcgcttgccattactccgctgatggtagaactggagaacggaaagaaagccgtcattatggaagccggattgtccaactatcccggcatgttcctcactgccaacccacagatgccccacggagtgaaggcagaattcgccccctatccactggaaacagtcatcggaggctatgaccgcttgaacctcgtccctaccaaacgtgccgacgttatcagcaagcccaacaatgccccctacttctgccccaacgggcgtcccacagggaaacagacctatccttggcgtgccgtgcttgttgttacccacgacacacaactcgccaacaacgacatgatgcaacgcctcgcacccgaatgccgcatcgctgacacatcctggattaaacccggaaaagtggcatgggactggtggaatacttgtaacctgaccggtgtggacttcaaggcaggcatgaatacgcccacctataagaaatacatcgactttgccgccgaaaaccagctggagtatatcatcatcgacgaaggttggagcggaaaggaatcattaatggaagacatcagtcccgaaatcaatctcgaagaactggtggcatacggcaaccaaaagggcataggcatcatcctctgggcaagctggcgcaatcttacgggaggaggcgacatctcccctgccgtggaacaagttatcagccactacgcacaaatgggaatcaaaggtttcaaaattgacttcttcgaccgcgacgaccaactcgccatctcttctaccgaacaactcgcagcatgtgccgccaagcatcacatgttgcttgacctacacggactgaaacccttcggcatccagcgcgcctatcccaacatcctcaactttgaaggtgtgaaaggactggaaaacagcaagtgggagcccatcgtgaacggtgcacccttgcatgacttcccgcgctacgacgttaccgccccctatctgcgccaactcgccggtccgatggactatacgccgggagctatggtaaatgccacccgttccctgttccgctccgtcaacgaccaccccatgagtcaaggtacacgtgtacaccagatggctatgtacaccgtcttcgaagcacccttgcagatgcttgccgacagtcccagcaaatacatgaaggaacaggaatgcaccgacttcatcgccaaggttcccactacctttgacgaaaccattgctcttgatggtaaaatagccgaatacatcacgatagcacgccgcaaaggaaacacttggtttgtaggcagcatgaccaactggactccgcgtagctgcaccatcgacctctccttcctcagcgaaggcaactacgaagccgaaatctttgccgacggcatcaatgccgaccgtgaagctaccgactataaaaaagaagtacgcatcgtcactgccaaagacaaactcaatgtacaactggcacccggcggtggatggacagcacgaattacaaaaaaatgaatctgagaaaactgtttctgccattgtgttcagtagccttgtgcctgcaatcctatgcacaagacaaatccttccttaaggatatgctctggtatatagacaacccttctgtatttgaaaaaggacaagaggaaggacacgcttggcatatgcccgaaaagagcatgctactgaatgggacatggaagtttttctggtgcgatacaccggaagggatacctgcacacttttttaaccccgaattcccggataagcaatggggcgacatcaaagttccctcaaactgggaaatgcaaggttatggtgacaagctgttcagaaatgtatctgctcccttcggggtgaatccaccacatgctcccaaagagtataaccctaccggactataccggcgaacattcaaggtacctgcaagttgggcagcaaaagaccagatatttttaaggttcgagaaagtggcatccgcttcttttgtatgggtcaacggtcatgaagtgggctacaatgaaggagcacaagaacctgccgaatacaacatcactccttatttgaagccgggcgaaaacacgctggctgtctgtgtactaaagtattcggacggctattacctggaaggacaagattattggcgactggccggaatctttgacgacgtatggttgtacgccacacctgctgtcaggatattcgactggcaagtaatcacagagtttgataatacgtataccgattcgcagttaagtattcaggtaaaaatcaaggactaccaaaagaagccaaatgagaattatggattgaaagcttacttaaaggataaaaacggcaagattatctgtaacttttccgcagctccatttgaaatggacgctgcggaaaagacaatacagttgcataccttggtacaagaaccccggaaatggacagccgagacacccgagctttatacgctcggtctggaattatccaatccggccggtctgcagaaagacaagatagaaacggtcatcggattcaaaaagacggaaatcaaagacggtgttttttatcttaacggtatcccactgaaagtcaatgcacaaaattcgcacatgcagcatcccgaagagggacatgtcatggacgaagccaccatacgcaaggattttgaattgttgaaacagtttaatttcaatgccgtacgtacctctcactatcctccggtgaataagtatttggaactggccaatgaatacgggctttatatcatagacgaggtgggcgatgaagcccatgcctcggaatggatttcaagtctcccggaatacgaagagatgtatcgcgagcgatgccgcagaatggtgttacgggacagaaaccatccctgcgtcttgttctggagcgcaggaaacgaaagcggtgaaggtatcaacattacccacaccattgaagaagggaaatcgctggaccccacccgcttctggatgtatggcggaaatgcattctcccatccggcagaagatattatcggaccccgttaccctactcctatggaactggaaatgcaggtaggcataggagaggattcccgaccatcgtttatggatgaatacttatcggttgcaggcaatgccggcggtgccctggacgattattgggaagccatctaccgacatccccgcctgataggaggggccatctgggattttgtaagtccgggactgaccgaacggataaggcaagtggacgacctttcgcccttccatactcccgcccatctgatgggaaatgcccgcttggtgaaggaaggaaagaacacggtgctggacttgaacggtcacgaccaatgggtagaggtctatcgtgcagacaatgtggagttgaacagtaatgaactgacactcacttgcagaatctacccccggaaactggtaagcagttgcggctcattcatcacaaaaggcaattatcagttcgggctgcaacaacgcggtaaagacaaactggaattttatatctatactgataaaaagcattccgtatgcgcctccttgcctactgactgggaatacaactggcatcaagtgacgtgcgtctacgacggacagaaaatgtccatctatatagacggagcagaaaaggcctccacacaagcatcgggcaatatccggaacttcccctaccccgtcaacatcggtcggaatgcagaaacacacggccaagagacttcggtctacatctgcgatgctcaaatggacgaagtcggcattttcgccaaggcactgacttcctcttttcacccggaagaagccgctctgtggctagattttgagcaagagacggaaaatggtacattctacagttacggcatcggtgcacgtacgtacggcagcatctggcccgaccgtagcgtacagcccgaaatgtggcaaatgaagaaaaccggacaacctctttctttttccatgtcggatgtgacagagggagtcgttgagttatggaatcgcaatcattatacaaatgcttcccgatatgccatacgatgggaattgaaagaagatgacaaggttattcaatcgggcgacttggcactctcaacagcgccgcttagccaagagctggtgcacataccttataagaagccagccctgattcccggcaaagaataccgcctgatgcttcatgccgtcctgaaaaaagatgaattgtgggcaaaagccggacatgaggtggcatgggaagaacttgaactgccttggagcctgccatgctcttcggaagaaaaggctcaaggcgtaccttcctattcactttcggagaaagaattggttgtctccggagatggcttcaaatatgtattcaaccgtaccgacggacaactgacgtcgatggttgttcaagatatggaactgctggaatcaccgctccggctgaatctttggcgtgccccgctggccaatgagctggacaactggaatgcctccagcgcccgctcctccaactggaaagaaggttacggatacacggtagccacagaaatgtattctgcagggattgaccgcctgacacatcagcccctctctttttcggtgtccgaaaccaccgaaggcgtacatatacacatcattgatgcggaattgatgggcaaaggagaaaaagagaaaaaagacctctacatcgaaggagtacagaacaacggcatcatcaaccactatgagtatattatcaatagtgaagggacgatagagatacgccatgtattgaagcctgaagggaaaatgccgctttggtttcctcgcataggacttacgctgaccgtaagcgatgcgctcgaccaagtgaaatggtacggccgaggaccgcaagagaactatccggaccggaaaaccggctatccgacggggatatatgcctctaccgtacaagctatgtacgagccctatctaatgccacaagattacggattgcggacagatgtacgctggctgcaactgaccacggacaaaggcatcggccttcaattcaagatgaacgaatggttcaacttcaacatttatccgtacagcacagacaatctgacgaaagcgatgtatacctaccaattgcagaagcagaaaggcatgaccctgaatctcgattatgccactaccggggtcggctgtacggcccgcggtgtattcggtgcttacaaggcaatgccgcaggaatatcggagaaccatcagcataagacctatgatgaaataaaaatattgtatcggactggtaagattatgaaaaacaaaaattactttattctattagtgttgtttttaagcgctttacaaataaaagcgcagtattcattcgacaacgtgctttatggtgcagcctactatcatgaatatatgccctatgagcgactggatgaagatatccggctgatgaaaagagccggcctgacagtagtgcgcgttggagaatctgcctggggagtatttgagccgcaagaaggaaattttgaatttgaatggatggaccacattctggacaagatgcatgcagcaggaatcaaagtcatcttgggaactcccacctattccattcctgcatggctggcatacaaacacccggaagtgctggcagaacacaccaaaggaaacaaagcctattatggaatcagacagaacatggattttacaaacccgacctaccaattctattgcgaacggattatccgcaagatgctggaaagatatgcacagcatccggcagtcatcgggtatcaagtggacaacgaaacagaagcgcgcggagtaaacaacagagactatttcttcggattcaggaactacatcaaacagaaattcaacaatgacctgaacctgcttgccaaggaatgggggctgaactactggggaatgaacatcaatacctgggaagaattctatcggcgcgatggagtgacaagcccctcgtacaagaatgaatgggaacgctataaccggaaagaagtggccgatttcctgaattggcagtgcgaccttgtaaatgaatacaagcgtaaagaccaatttgtcacccactgctttatgcccgacttccataatatagaccaagtggaaagtttcaggcagatgcaatatcctgccatcaatgtctatcacgatgtacaggataaacaagacggccagcgcatcgcttatgccggtgacttcgtgcgcaccgtggccgacaacaattacatcgtcatggaaaccaacgcacaaggcattggctgggatgcccgcacccagtttcctccctacgacaaccagttgcggcagaatgtgtacgcacattatgcttccggagccaatatggtggaatactggcactggtctaccctgcactacgggcaggagacatactggcgaggcgtgctgggccatgacctccagcccaaccgcatatacaaggaattcaccaccaccgccaaagagttggaaagaataggcagccacatcgcgaacctgaaaaagaaaaaccgggcggctatcctctacagtcatgattcttatcatgctctcggcttcatgccctacacttacaagagcaattatcccattgatatggtgcataaagccctctatttccaaaacatagaaacggacatcatcccttgtgacaagacaaccgatttcagcggatatgacatgcttgtcattccccctttgtatgtggctaccgaccaattgctattagccattgatgaattcgtacagtccggcggacacgtggtaatgatgcacaaaagcagttactgcaatgagcactccgcagttcgggccaccttggctcccgggccgctacgcaaagcctgcggcttccattaccaggaattctccactatcggtgacttatcattaaaggataacccctttcaattagagggaaagaaccagataagcgactggtatgaattcctgattcccgagacagccaccccgttggcttatgcagagcatccgttcttcggcaaatggcccgttgtcaccgaaaacaagtatggcaaaggcaaactgacctacataggagcctacccttcgcaggaattgctgaatgccatcgtgcgaaaggcagccatccatgccggtatcatctcttcagagagcgacgtgttccccatcatacagcgttcgggaataaacaaagccggaaaagccatccgttacttcttcaattacagcagcgagagcaaagaaatcactcataactatccgacgtccaaagagctgatttccggcaagactgtaaaagaaggagaccatgtaacattgcccccctggggagttctcatcatggaagtttattgaccatcagaaaaaatgagaaaaaatgagaaaaaagatatttgcctttctattgctaagtgccctatatgccggcgcccaagaagttccggactgggagaatcctattgtagtcggcatcaacaaagagccgtatcatgccacactgacattgccttcgcaaaaagccgattgcaaagaaatcagatccctgaacggcaagtggcgattccaatggtctgccgacccgggaaagcgcccggccgacttctacaagaatgatttcaataccgacacatgggataccatcacagtaccgggagcatggcaattgcaaggttatgggaaacctatctattccaacgtaaactatcccttccagaaggatgcacccaaagtgacaagcgagcctcccgccgaatattacagctacgggcacagaaatcccacaggctcttatgtcaccacgttcgaagtgacgcccgatatgaaagacaagtgcctataccttcactttgaaggagtaaaatcggccatgtatgtctgggtaaacggagagcgggtaggctacagccagaattcgatgtcgcctgccgagtttgacataaccgaatttgtgaagaacggaaccaatcgtctggcagtggaagtgtatcggtggtcggacggcagttatctggaagaccaggacatgtggcggcttagtggaatactcaggccggtagagctatgggtacgtccccggacaaatatccgggactataggttcagcagcgacttgtcggacgacatgcgttcagctacattcggaaccgaaatttggataagaaaccagaccgaccgcaaagtaaaagacctgaccgtagaaataaacctggtggggaaagacaacagaggaaataaactcgacaaaaaaatggtggctcccgtaggtactattcaggccttttctgaaacgagcgtcacgctgtccgaaatgctccgggagcctcaactatggtctgccgagaaaccgcatctatatgacatccacatcaagcttcgcagaaagaatgaacttttggaatcgttcgaataccattggggcatacggaaaatagaaatcgcgggagacgtcttcaaagtcaacgggaaagccgtcaagctgaaaggagtgaaccgtcacgactttcatccccgtatgggattctttgtcgacagccggacgatggagagagatatccggttgattaaacaagccaacatcaacatgatacgcacgtcccactacccacatctgccattgctgtacgagctatgtgacaagtatggaatctacgtaatggacgaagcgaaccacgaaagtcatgcctacggtttggggaacaaagtattaggagacaaccctcaatggacactggcccatgtggaccgggcagtagccgtggtggaaagggacaagaaccatccgtgcatcctattctggtcattgggcaacgagggtggaagcggtgccaatttgcgagctatggcagacacaatccgtgccttagaccccaccagaccgatatacgacgacacagaccgcaccgtatccgatgtctatgacgaagcctatctgcatcccgacgctttgaaggaacttggcgagaaaataaccgaccgccccgtattcatgagagagtatgcctacgccatgggaaattccatcggcaacctcaaggagtattgggatgtgattgaaaaggacgaaagtattatcggagctgccatttggtgctgggtagaccaaggcattcctaaaaagcttaacggtgcaccgttaagtttcggcgagagcccctcgtcactcccattactgcccgatgaattctgggcgtatggaggagatttcggggactatcccaacgacggtcccaccggcattaacgggttggtatctcccgaccgggtgcctcacccccattactatgaagtacaaaaagtatatcaatacatcaagtttgaaaagaagggaacacagcaaatcaaattgaccaacgggtatgcgttttccgatttggatgaattcgattacagctatgagtggatatgcaacggaaaggctgtacgcaacggcgacctccacttgtccgaagggaatctgctggaggtactttcaagaccggataagtgtggggaactttgcctcaatgtatatgccacgttgaaggaatccacgacgtgggcagagaagggcttcaaagttgccaaggaacaacttacgtatcatgactatgaattcccacaattgaaggatgacggcgggaaggccacgtttaaggagacacccgaagcggtggaaattatagccgccgatgccttgttcaccatagaaaaaggtaccggtgctttggtgagttggcgagtcaagggagaagagttgttgcacagtgccttggaaccctatttttggaaaccggcaaatgacattcaggtccgcaacggctacaatgaacgtttgagcgcttggaaaaatgcagagcaaaaacgtatcgtaaagacataccaagcaaccgtaaacgatggtatggtgatagtggatgccagtctctccctcccccggataggagccggttaccatctccgctacactgtggacggcaaaggccgcatacaagtagaagcaacctatcagcctgaaaaggaagatattccgctgatgcccaaattcggtatgcgcatgagaatgccctcggcgctgaaccggatagcctggtacggacgcggcaagttcgagaactatcccgaccgcaagagctccgctttcctgggagtctacgagtgtggcatacacgaatttatcacgaactacatcgtaccgcaagacaatgccaaccggtgcgatacacgctggttcatgctgggagacagtgagcgatggaaaatacaagtcaaaggcctgcaacccctatgtttccgtatatggccctacggggaagaagacctggaagggaaagagcatgcgcacgaactgcccgaacgcgacttcatcaacctgaatatcgactccaacatacacggagtaggtggaaacgacggatggggcgcacagaccatgaagccatacaccattgacggcaatcgctcttaccggtatgggtttatcatggagtatatggacaaaacagaataatccgttcatcaatgcattcaaaaagggaataaacattttgtaaacaacaataaaggtatgaaaagaaacatctttaaaacaattctcctatctgcctgcatcctacaagggggcagtgcattggcacaacaagagaaagcagaaccgggcaagttctcacccacctgggagtcattgtcccaatacgaagtgcccgaatggttccgcaacgccaaattcggcatatgggcacactggggtccgcaatgccaacccgaagccggcgactggtacggtcgtggcatgtacgaagagggtggtgctgcctacaagtggcacttggagcattacggacatccttcggaattcggcttcaaggatgtaatcaacgaatggaaagccgaaaaatggaatccggagaggctggtagcccttttcaagaaaaccggtgcccgatatttctttgccatgggcaaccatcacgacaacatggacttgtgggacagtaaataccaatcatggaactccgtcaacatgggccccaagcgaaacgtactgggcgaatgggagaaagcggcccgcaaaaacaaactgcccttcggtgtcagcatccactcctcccatgcttggacatggtatgaaactgcacaaggagccgacaagaaaggcccatacgcaggaatctcctacgatgcccgcgtagtgactaaggaagacggcaagggaaaatggtgggaaggctacgacccgcaagagctatacgtacagaatcatgccctgagcggacatgcttgggtggcatgggactggcccgaaggaacctctgtccccccgcagagttactacgacaacttcttcgaccgcacagtggacatgataaacaaatatcatcccgacctggtctatttcgacgacagcgtactccccttctggcccatcaacgatacggggctgaaagtcgtgtcgcactactataaccaaaacatgaagcttcacaagggcaatctcaatgccgtagtcttcggaaagaagctggaagctaaacataaagaggccatcgtatgggatgtagaaaaaggggttccatcggaatgccaggacaaggcgtggcaaacctgtagttgcctcggtacttggcactataaccgctctgcttacgaagacaactggtataaatcagccgagaccgtcatccacatgctcattgacatcgtcagtaaaaatggcaacctattactaagcgtaccaatgaaaggaaacggcaccatcgacgacaaggaagaaaaaattctggaagacatagccgcctggatggaggtgaacggagaaggaatattcgacacacgtccctggtgtatttatggtgaaggtccctccacagaaacagcaatacctttggacggagcaggattcaacgaaggcaagaacgcaccctacacttctgccgacatccggtttgtgaaaaaagggaaatacttgtatgcccatatcatgaaatggccctcagacggaaaaatacagataaaatcactggctaccggcagtccctactgcaaaggagaaatcgaaaaagtagaattattaggaggtggaaaggcaaagttcagaagaacttccaaaggcttgcttattgaccttcccaaagacaagacacccaatcctatttctttggtactgaaaatcactaaccgttaaactgctgatattgtatgaaaaagggattttttttaagactatttgtcctgctgatgctgacatttttcatagcagaacaaggcaaagcacaaacctaccaacgcacctcacaaggcataaaaagcactgtgcaaggtataaatatagatattagcttcttctctcctgtcacagtgagaatcttaaaatcgcctgacggctggaagtataccaaagaaagcttgtcggtcatcgggcaaccggaaaaagtaaaactatccgtctcttcgaaagggggtatattgactatcaaaagccatcagcttacagtccatctcaacgaagagaccggacaaataacttttgcctcttccgatggaaaatcgctgttgcaggaacaaaataaaggcacacgttttgatgatttcaacgatgccggcacaaaaaccttcagcgtttatcaatcgttcaccttagagaaagacgaagctatttatggattgggacaattgcaaaacggcaaaatgtcgcaacgtaaccagaccaaacgccttatccaagacaatcttgaggatgtgattcccttcttccagtccgtcaaaggctacggtctcttttgggacaactattcgccaaccatcttcaaagacaatcaagaagagacatccttcctttctgaagtcggcgactgcattgactactatttcatgtacggcgaaaatgccgatggagtagttgcccagatgcgctacctcacaggacaagtgcccatgtttccattatggacatatggattctggcaaagccgtgaacgctacaaaagccaaaaagagattgttggcgtagtgcaaaaataccgcgaactgggtgtgcccctcgatggaattatccaggattggagatactggggaagcaactacctgtggaacgcaatggattttttgaacgaagaattctccgaccccaaaaaaatgatggaagacatacacggaatgaatgcccacattatcatctccatttggtcagctttcggaccacataccaaaccctatcacgagttggataaagggaacatgctcttcaacttccgcacatggcccgaatccggttccgagaagtggcctcccaatatggactatccatccggtgcccgcgtgtacgatgcctaccatccgcaagcacgcgacatctattggaagtacctgaacgagaacctacgttctgtgggtatagacggctggtggatggactctaccgaacccgaccattttcaccccattcctgaagattttgacacgcccacctatttggggtcattccgtaaagtacgcaatgcctaccctttaatgagtgtaggtggagtgtacgaccaccagcgtgccgtaacttcggataaacgcgtatttatccttacccgctcagcctttgccggccagcaacgttatggtgccaatacatggacaggagatatcacagcatcatgggaagttttggagaagcaaatacctgcgggattaaacttctcactatgcggcattccccattggaacagcgatatcggcggattcttcctatggcaatatcccttgatgctggatgacccggattatcgcgagctttatgcccgttggatacagttcggtacattctgtcccatgatgcggtcacatggggaaggtgctcccagagaaatctatcaattcggcaaaaaaggcgagccaatatacgatgcgattgagaaatacattcggttacgctacagtttgttaccatacatctacacaactgcctgggaggtaactgccaatcagtccagcttcatgcgtgccttggcaatggattttgcccacgatcgcaacgtgtggaacatccacaatcagtatatgtttggcaaatccctattggtatgccctgtaacccaacccatgtatacccaaacagtttcggacaccatccgtgtagaagatttcagtaccgttaagtctatgcgaatatatctgcctaaaaatacggaatggtatgatttttggaccaatcagaaacactccggcggacaatatatcgtgaaagatacccctattgacattttaccactttatgtgaaagcaggttccatcctgccaataggtcccgaagtgcagtatagcaccgaaaaatcatgggacaacttggagataaaagtgtatcccggttgtaacggcgaattcacactttacgaagacgagaatgacaactacaattatgaaaaaggaatgtacagcaccattacgatgaaatggaatgaccgtactcgcatgctcactattgaaaatcggaaaggagagttttccggtatgttgaaagaacggaaattcaacatagtaactgctgatggcgcaaaaaaggcagtggcttataatgggaaaaaagtaacggttaaaatgtaatggtttctaaaaacagctattaatttgcattatggaaataaatactcgtatgaaaaaatatcatcattatcttacccttttaagtttatttatgctgctcggcatcctgaaattgcaagcagcgatacaactccctgccatattttccaaccatatggtgctacaacgtaactcagaacttactttctggggatggggtattccgggagaaacaatttccatcgcccccgaatggatgaaaggagaaataatcaaaacccaagtcaataatacggggaaatggtcagcccgtgtaccttccggcgaagccggcggaccttatgagattcgtttcagcggctcgtcagaagtaaccttgaccgatgtcatgctaggcgaagtttggctgtgcagcggacaatccaatatggaatggagcgccaaccacggcataaagaacggagacgaggaaacggcaaatgcccattgtcccaatctccgaatttttcacgtggccagaatagccgccccgttccctcaagaaaactgtttctcgcaatggacacagtgcacgcccgaaacgatgcgcagcacgagtgccctggcctacttcttcggccgcaacatccaggaagagctggacgtgccggtaggaatcatcgtagccgcatggggcggaaccaccgccgagacatggacgccccgcgaatgcgtaatgagcgacccggtcttgtgcgactatccgtatgaatccaatccttggtttccggctgaaacaggcacgttgtacaacagcatgatttatcccgtgatgccctacggcattgccggatgcatctggtatcagggagaagccaaccaaggccgtgccagctcctacgcccgggtgatgcagcggctgataggctcgtggcgtaccggatttaacaaggaattcccattctatctggtccagatagcccccttccaataccactccaaagacaacggaccggcactgctacgcgagcagcaggccatgttgcccgaaatgctggacaaggtcaagatgattaccgtgtcagatttggtggacaatgtgcaggacatccatccacgtgacaaaagaagcgtaggcaaacgtctcgccaatcttgcactggacgatacataccatatatatgcaggcccctataaaagcccggtctttgaaagcgcctgccgcaaaggcaaccatgtgacaatctctttcaaagacataaagaacggactggccgtacacgggaaaaggatagaggggctgatgatggccgcagccggccaggaatggcaagaggcccgggccaggatagacgggggaaagctgattgtcccggtaaaaggaatcgaaagcccggtttccattcgctactgcttcagtgacgctgctcaaggcaaccttttttcaacggaaggcatccccttagcccccttccggacagacagcattgcctcttctgaaaacattccggtttctacagacagcgctttggaagaatcttttgaattctcgcccaagttctctaccggcaatgccaatccccttctcgacttccaatacatggccgaccccacagcagtggtgcacgacggccgcatttatgtgtacggcactaacgaccaccagcaatatgatgtagtgggccgtaacgggaaaaacacctatcagcacatccattcgctgacgatggtctcttctgacgacatggtgaactggacttatcacggagtaatcaatgtaaaggctctggctccctggggaatggcttcgtgggcaccttccatcgcttcgcgcaaggaggccgacggcaaaacacacttctatctgtactactccaacagcggttccggtgtaggtatgctgaccgccacttcccccgtggggccctggacagacccattgggcaaatgcgtggtagacggcaatactccaggactcggcaagtgtaaagctcctttcgatccgggagtagtcatcgacgacaagggcatcggctggctctcctttggcgggggcgacagcgacgactacattcccggagacgcacgcatcgtgcggctggcaaatgacatgaagacgctggacagcgaaatagttgaaataaaagcgccataccactttgaagcaaacgaactgaactatctgaacggcacttggatttacacctacaacaccaactggaagaaccgggatgcatggccccacaaggatatagacaagccgagccggtgctgcatgagctacatgacgagtcgcacgccacttgagacagacagctggacctatcgggacaactacttcaaaaatcccggcgactatggcatgtccgacagcaacaaccatacacatctggtaaaatttcaagggaagtactatctcttctaccactcactgagcttgcaggacagccgcgacctcaaagtgggcgtccgcagtatctgcgtggaagaaatagaggtggacgaaaaggacctcactatccacatgggcacagccacagccaagggcgtttcacaaatcaagcctctcgacccgtttgcgcagcaacaggccgagaccacagccgccacacgcggcgttgcctttgaaccgaccggacagacaggcaacatgtctgccgtaggaaacaagagcggacaggccatctgtgtccgcggtgcggaattcccgcaatcacctcaagccatacagatgaagataaaagggaaaggctccatcgaaatacacatggacagtccagacggtccgctcctatccaccttgacctttgataccgatacgtggcaaacattgacaaagccgttggacaaacggataaaaggcaaacacgacatttacttcgtattcgggaacggaaagttcttatttgacgaatggaaattcacaaaataatgaatccgtcggcagaatctgcccagtatctcttcacccttgtgatgatatcgctgcacaattcgagccaacacacaacaagccagcaagttactttgccagcgttttgccaccatattggcaaagttttgccatgcctttggcaaaaccttgccaacttgtcggcaagaaagacaaaagcaacatcgctgtccgcaaagaggcggaagcacgtcctcaatataattccgctaacgggaaagagacagattagttccattaacgggcagaagttttaaaaaatgggaaggatttggcacaatagttctgcgcaaattctcatttatcgaacaaaaattgtatttttgcctgcgactgaaaaatcagtaatatcatagaatagacaattcccgaacaaatatgagcgaagattttgaagcaccgaaagatgatttggacaaggaactcccggccgggagcgaagaacactcggattacaaacctgcggacgcaaaggatgccaatataaagcaccaactgagcggcatgtaccagaattggtttctggactacgcctcatacgttatattggaacgtgccgtaccccatatcatggatggtctgaaacccgtacagcggcgtatcctccactccatgcgccgcatggaagacgggcgctacaacaaggtggcgaacatcgtgggacacaccatgcagttccatcctcacggtgatgcttctatcggcgatgctctggtacaactgggacaaaaggacttgctcgtggattgccagggaaactggggtaacattctgacgggtgacagcgccgctgccccccgttatatcgaagcacgtctctccaagttcgcactggacgtggtattcaaccccaagaccaccgaatggaaactctcttatgacgggcgaaacaaagaaccggttacactaccggtaaaattcccactgctgcttgcacaaggtgtggaaggtattgccgtaggcctgtcatccaaaatattaccacataacttcaatgagctgtgcgatgcttccatcagctatctgcacaacgaagaattcaagctgtaccccgacttccagacgggaggcagtatcgatgtatccaaatacaacgacggtgaacgtggcggtgcgatacgcgtgcgctccaaaatagaaaagatagacaacaagacacttgccattaaggaaattccttacgggaaaacggtggccagtgtatgcgactccatcgtaaaggccagcgaaaaaggaaaaatcaagatacgtaaggtagaggacctgacatccggcagtgtggaaatattagtgcatctagccccgggtgtatcatccgacaagaccatcgatgccctctatgccttcaccgactgtgaagtgagcatctctcccaactgctgtgtcatcgacgaccaaaagccccacttcctcaccgtgagtgatgtattgcgcaaatcagtcgacaacacattggcactgctacgccaggaactggaaatccgtaagggcgagatactggaaagcctgcattttgcttcactcgaaaagatattcatcgaagaacgcatctacaaggataaggagtttgaacaagccaagaatatggatgccgcctgcgagcatatcgatgagcgcctaactccctactacccgactttcatccgcgaagtgaccaaggaaaacatcctccggctgatggagataaagatggcacgtatcctcaagttcaactccgacaaggcagaggaactgatagcacgtatgaagaaggacatagaggagatagaccgccatctggcaaacatcgtggaatataccgtcgactggttccgtatgctgaaggacaagtacggcaaagacttcccccgccacacggaactgcgtaacttcgacaccatcgaggcaaccaaagtcatcgaagccaacgaaaagctgtacatcaaccgcgaagaggggttcatcggaactggattgaagaaagacgaattcataggcaactgctcgcccatagatgacgtgattatcttcttccgcgatggaaaatatatcattaccccagtggccgacaagaagttcgtaggcaagaatatactttatgccaacattttcaagaagaacgacaaacgtaccatctacaatgtctgctaccgtgacggcaaggaggggacaagctatatcaagcgttttgccgtcacttccgtggtgcgtgaccgcgaatacgatgtgacgcagggcacccccgactcccgtatcacctacttcaccgccaaccccaacggcgaagccgaaatcatcaaggtaaccctgaaacccaatccccgcgtacgccgcatcatcttcgaggaggatttcagcaatatcaatatcaagggacggcaggccatgggaaatatactcacgaaactccccgtacacaagatagccttgaaacagcgcggaggctccaccctgggcggacggaaagtctggttcgaccgtgacgtgctgcgcctcaactacgacggtcgcggagaatatctcggagaattccagagcgaagacaccatccttgtcgtacagaacagcggagagttctatgccaccaacttcgacctgaacaatcactatgacgacggcatacgcgtattggagaaatacgatccgaacaaagtatggaccgccgtactctacgatgccgaccagcagaactatccttacatcaagcgtttctgcttcgaagcaaccgcccgcaagcaaaactatttaggagaaaacaagaacagcagcctcattctgctgacagacgagtgctacccacgtttagaagtggtgtttggcggtcacgacaatttccgagagccgatggtggtggaagccgacgaattcatcgccgtgaaaggcttcaaagcaaaaggcaagcgcctaaccacctatactatagaaaccatcaacgaactggagcctacccgtcaaccggaaccctcgcaggaaaccgaagagcaggaaacggatgaagaaccggaaattctggaccccgaccacggtaaaagtgaaggggacatactggacgagctgacaggacagatgaagctgttttgatgaagaatgagaatgaaggattagggattggctgacgattactaatttgtaattgagaatttaatatgtacgtatacaagataataatcctatgcggactgctcttgggaagtgccggactgaaagcacaagaagcacaatgcagcatcgaccgggagctacgggctgactccaccaaccgcaaccgtatcatcactcgtgccaccatgtatggtatcggcttcaccaacgtgttcgacacttatctttcacctcaggagtacaagggaatcgatttccgtatctcccgcgaaagcatgcggatgacacggttgatgggcggcaacgtatctctgcaaactttcttccaggcagacttgggatacacacacaataaagtagacaataacaatacattctccggactggccaactggaactacggcctgcattataattttccaatcacaggcaatttcaaactgcttgccggaggagtcggcgacttcaacggtggctttgtctataatctgcgcaacggaaacaaccccgcccaagcacgtgcctatatcaaccttgccgcatcgggaatggctatttggaacttacgcatcaagaaccgtcccatcacactacgctatcaggtgaatcttcctttggcaggtatcatgttcatgcccaactatggacagtcctactacgagatatttacgttgggacattgggacggagtagtgaacttcacctccctgcacaaccagccctctctgagacaaatgctgaccgccgactttccggtgggacgtgcccggatgcgttttgcttacatatgggacgcacaacagtccaaagtaaacgaaataaagacacatacttactcgcacgtattcatggtggggttcgtaaaggaactctatctgtttcctaacaagagaaagtaaaaagtgacaaggtaataaatgataagacgataaggataatgtgcatgaaaagaatatatatcttaataatttggagtgccctactcatgttactgcccctattgaacggatgtattcgtgaggaagaggttaacaataccccacaaggcaacttcgaagccttgtggaaaataatagacgaacagtactgtttcctggactacaagcaaatagattggaatgccattcatgacaagtaccaaccgctcatcaccccgggaatgagctacgacggtctatttgaaatattaggtaacatgcttgccgagttgaaagacggacatgtcaacttgtactcttcttccaacatggcacgctactgggactggtatctggattatccccgtaacttcaacgaaagtatcattgaaaagtacctgggaagagactaccgcattgccggaggcgccaaatataccattttggaggacaacataggatatatctattacggtgatttctccagcggcatcggaaacggcaacctggatgagattctgttatacctttccgcttgcaatggcctgataatcgacgtacgcaacaacggtggcggcaacttgacaaacgccacccgaatggtacaacgtttcacgaataaaaaagtactgacgggatatattcagcacaaaactggcaaaggccatagcgatttttcagatccgactcccatttatgtagaaccttccaacagtatccgctggcaaaaaaaggtaattgtcctgacaaaccgtcattcctatagtgcaaccaatgattttgtcaattccatgcgctgttttcccaatgtcaccttggttggtgataaaaccggcggagggtcgggcctgccattctcttcggaactgcccaacggatggggagtacgcttttctgccagcccgcacctcgatgcccaaaaacagcatatcgagttcggcatcgacccagacaaaaaggtggatatgagcaaagaagatgagaacaatgacctggataccatcattgaggaagcaagaaaaatgctgaaagtgacttcctaaaacgactttatctaaaaaacaatttgccaaaacgaaaattctttctatctttgccaccgctaatcggaattattccgcggatgtggcgtaattggtagccgcgccagacttaggatctggtgccgtgaggcgtgtaggttcgagtcctatcatccgcacaatccctataataattttcaaaagacaaacaactaagaggggaggatattcattaagaagcatcctccctaaccgcttcaagtaccttttttatctcatcaaaacacaatatttagaatacttattgtatctttgcttccaagaaacacttcgattaacctaaaaaatgaaacaaaatacgataagaccgatgcttttcaagcgttgggtagtgtgccttttattgtttattctcttcatccaggccagggcttcttccttcatgcccgccgtcaccaactatcttgccaaagactatgaagccggttatcagaactgggcatgtgcgcaaggtagcaacggcgaaatgtttttcggcaacagccaaggactcctggtatatgacggttatcgctggacactacacaaagtaccgggaaaccatattgtacgttcagtatacgtcaaggaagatcgcatctatgtgggggcattcgaggaattcggctatttcaagtattcggaggcaggcactctccggtaccattctttgagcaaattcctgaagaatttccccatggagaacaacgagatatggaacattgtagagctggacggccgcatctacttccagtcgttcagcgcatggttctcctacgacgggaaaatggtacgcgctttccgcaacagacaacaacagccgctctacttctacaaccaaaacggacatatctacacacaaatgattgatgaaggcttctatgaattcgacggcaaggagttccatcacctctttccccgcagcaaagtgaacgatgacaatgtagtggcattactgcccgacggaaacaacagcttcctgatggtcacggagaacaacggactgttccgctacacgggtgacatcaccccctggaaaacagacattgatgcagagctgaagaaacagcgggtgaaccgcgccgtcatgaccaatgactccatattcatgataggtacagtcctaaacggcatatacgccatcgaccgcaaaggacattgcctctggcacttcaatctggataaccgtttggacaacaacacagtcctgggactgttctgtgacaaagacaacaacgtatgggcagcattggacgacggcatcgcatacatccaccacaactcccccgtcatgctactgacccctgccaaccatgaaaccaagctgggtatggtgtacgacatagcccaccggggtgactgtttctatctggccaccaaccagggcttgtacgaataccaccagattaccggaaatatgcgtttgcttccccatagcgaaggacagaactggtatgtaaaggacattgacgggcaactctttgcaggtaacaatgcccataccttattaataggcgaaaaagggaacgtttccgtcataagcaataccaacagcagtacgtgtctgattaagtgcaccctctatggcgaagagatactgttggaatcatcctacgccaatttgcgtatctataaaaagaagaacggtcaatggaccttttcgcatgtcgtagacggcttcattgcaccggtcatgcacttggaggttgaccaaagcggtgtcatctgggcttcacacatgtatcagggagtctataaaatagtcttgagcgatgacttgtcggctgtaaaaagcgtacggcacatctcccatttaggctcggaatatatcatcggccctatccaagtaatgaaaatgcggggacgtatcgtcttttccagtcccaatggcttctatacctatgacgacatcacccggcagattatccccttccaaaagctgaataccattctgccttacatcaggaatgcccattctgtggtatccgtcacgaacgaccgcttctggctgtccggttcacatgagtacgcactggtagagtacgcggaaggagagtacatcgtgaaacaacgcattctcatcgaactgtttgattctccatgtatagagaactacaacaatgtgttcgttgacaatgacgttgtctattttaatctaaataacggaatcgccagttacagcaaaaacacagacagcctcagtccaacgttggagtccgccctatcactgagctctgtcatttgctcttcttcagataaaaaggagaaacgcctgcctctgcagggaaatgtcgaactggaaagcaattaccgggatttgctgttctcggtaagcctgccgcattacaataaattgtccgtacatttccattatgtcctgcaaggaggacaaggcatggctctgacatcagacctaaaagagcccgaaatccgctacggtagcctggattacggagaatacacattccaagcagaagcctataatgatttgggacagaaaatcggtgaagtggaatatcatttcgccatagcccgtcctttctacctcacctattatgcttttgcactctatcttatagttctcattgcacttctctacttcttctccaagtggcgcgccaaccgtgccatggaaaagaaacggaaagaatacgaagctgagcagatgcagcagaacatcaagatgcgtgagcaggaacatctgataactctacagcagcaacaattgctggaagccgagctgtcagcaaagagtaaagaccttgccagcatggcgctgggtgtatttgccaagaacgaagtcttggagaaacttcgtgctgccgtgcaagaattcctggtaaaagggcaatatggacgcaagaacctcgaatctctgctgaagctcatcaacgaaaacatcgagacacaagagttctgggacgtattccagaacaatttcgacctaattcatgagaaattcttccgcaacctgcgcgaacgttatcccagccttaccgccaccgatctgcgtttttgcgcactgttgcgcctaaacctttctacgaaagacattgcgcaaatgaccaaccttaccatccggggagtggaggcagcacgctaccgtctgcgcaagaagctggatatccccgacggaacgggattagtagattttctcattgacttgaaataatacggctacaaaccattctatcataataaactgattattagaaataagtaacactaaaacgtagtaaaacagtacccctttttactctaagcgtattatcgtggtagtgattttttttgccttacttgccgttattactttctttgccggcagaattattaactcttaaatttagttatgagaaggcaaacattatttcttctattcatgattttgttctcgttgccactgacagttttggcacaaggaacaaagacagttaaaggaactgttgttgaccagaacaatgaaccgatcatcggagccacggttgtagtaaaaggctctactattggagcagctaccgacctcgacggtaactatgtactgaacggcgtccccgaagacgcaactctcgtattcaactatttgggcatgttgccgcaggaaataagcgctgcgggacaatccgtcattaatgtaaagctacgtgaagatgcacaactactggaagaagttgttgttatcggttacggttcggccaaggcgaaagacctgacggccccgattgacgttgtcaaagagaaagaacttatcaatgttcctacctcctccccgatggcagcattgcagggaaaggtaccgggtgttaacatcatcaattcgggaacgccgggcgaaggtcctaaagtgaccatccgtggtatgggttccttcggtgacacttctcctctctatgtagtggacggaatgttctacgacaacatcaacttcctgaacaattccgacattcaggacatgaccatcttgaaagacgcatccgcatctgccatctacggtgtacgcgccgccaacggtgttgtaatcatcaccaccaagaaaggaagccgcaaccaggatgccaagattacctataacggttatgtaggtattcagaaagccaccaacctgctggagatgtgtaactctcacgagtatgccaccatgatgttggaagccaacccggaagcttaccggtcgattttcgaaaagtcagtagccgaattcggaggcaatatggaaaacctgcaattcaatgccgataccaactggtatgacgaactgttgcgcacagccatgatgaccaatcacagcttgaatatctccggtggtacggaaaaagcgacctactctgccggcatgagctatctggcacaagacggtatcatggacgtggaaaactactaccgccgcttgaacttccgtgccgcccttgactacgaagcccgcaaatggctgaaagtaggcttcaacggcgtattcagcaactcgcagcagcagcttcccaagaatgccgcatggcaacaggcatacaacacaccgtctatcatcccggtgtatgatgaccgccgcgacgatgccgtgttccctaagaagtacacatcgcccgagcaggtgggcctgaccaacaacttcaacaatccggtagccactgccaactattacgacaaccggaacgagacctaccaagtgctgaccaacttctatgcacagctcaacctcatccccgacaagctgaatatacgcagtagctacagctacgactactcaatgattcgcggttctgagttcactcctacctactatgtaggcaccaaccagaagaaagaggttaccgaactcactaaaaagaacactaactactacaaatatatatgggacaacgtggccacttatactgacaagtggggcaaacactcctttaccggtatgctgggtgcatccatgcgtcaagagcaataccgcctgctcgaaggtaccgccaccaacgtgcccgaaggtgaggacgtgtggaaatacatcgcactgggcaacaaggaaggcgctacggtgaaagacgacggctggaaataccgcggtctctcctatttcacccgactgaattacaactacaacgacaagtacatgttgatgttcaccttccgtgccgacggctcgtccaagtacaacgacaaatggggctacttcccctccatcggtgccgcatgggtcatctcccaagaaccgtttatgaagaaccagaatatcttcgactacatgaagctgcgtgccagctggggtaagctgggtaacgacaagattgctgccagtgcaggcttcgcaagcatacagaacgtacagtccgtattcggtcccaataccgccatcgacggattcatcaacaccaccaacttcagctggctgggttgggaagtagtgaacgaaaccaacgtgggcgtcaacttcagtacactgaagaaccgcttgaacgccgacatcgactggtactaccgtctgactgacaacgccgtgatttcacccaagctcccgatgagtggcgagctgctggccggcaacaacggacagattctgaataccggtatcgacctctccttgaactggaacgacaagattggccaggacttcaattacaacatcggcgtcaatctctcttatctgcataacgaagtgaaaagcctaaaaggaaacatgaaaatcatcaaaggcggaaagaccgtgaatatggtgggcgagacgatgaactcattctatggctacaaggtcatcggcatctaccagactcctgaacaatgtgctgccgaccccatcgccgtggccaacggactggaacccggcgacttcatctacgaggacgtgaacggcgaccatgtgatagacggaaacgacaagcaggtgttgggctcatacgtgcccagctttacttatggcttcaatgccggattctcttataagaacttcgacttcagcctcactacctacggacaaacaggcggcgaactgtggaaccgtaagcgtgccctgcgctatgcagccgactactataactttgaccgtgcacagtatgagaaccgctggacgggtgcaggctctaccaacgaacatccgtcggccaaggctcttctcaaaacctggaacaaatcagacagtaacaacgcttcctatttcgtagaaagctccgattacttccgcatccagaacatcacgctgggctactcgttcaagaacttgaagataggcagctacgtgatgccgggactccgcctctcattgacggccgaccgccccttcactaccttcaaggccaacagcttcacacctgaagtgtcggatgccgaaggttgggataccgaagtataccctctgacttcaacctatactttcggagtgcaaatagatttctaaaccctaaaacgtaaaacaatgaaattcttaaagaaaacattcgcatatatacttccggccatgatggtactgggaggagctaccgcttgcaccgatttcatagaaatcgatccggagaacaaagttcccgaacaaggcgtggactttaccaacaagaacaatatgtaccaacccgtagtgggtgcctactccaaagtacgcacacagggcatgcactggtgcaacgcactattgatgttcacccgcgacggtgacgtgtggtcgggccgtaccgatgaccagggcgatgccgtggccttcggacgcaagttcaactacaacaactcattctgggcactgaaccaggtatggatgaacttctacgacatcatccgcatcaccaatgccgccctgcaaagcctcgacggttatgccgaatatcttgctgcaggaagcgaagattacaaaacctacgaatcctattgcggcgaagtacgtaccatccgtgcatgggcttactattgtctggtgaccaatttcggtcccaccgtcatctaccgtgacaacctgcagaccgattttcgccgttctaccgtagaggccgtatataattatatgctggaagatttgaactacgccatcgacaaactgccccgcatgcgtcccaaccagatggaacacaagggagccgtgacagccttcaccgcccaagcattggccgcccgcatctatctgctgaaaggagactatgcacaagtggagacactgaccgatgacatcatcaagaacggtggattccgtctctacgacgacttctaccagctgttcaaaattcccggaaagttgtgtgacgaatctttgttcgaatgccaggtaacagactacggcaatggttctggcgattacctgggcgtagaccaatggttcaatttccagggtccgaacatggcagagaggtatgatgaagtagtgaacgcagacggtaccatcagctacaagcaagccgaaggcaccaagtccataggcggctggaatttcataggctatgaacccgagttcgtggcatgggccgaagcccgtggcgaaggtgtgcgtgccgaaacttctttcctgaaagccctgagcaagacgcgcgagggttggcaggtaggtcccacatcggccaccaagaccgactgttggaacggcaaaggttaccttccctacaatcagatgactcttccacgtacgacctacggagccaacaacaatgtgcgtatcatccgctatgccgaagtgctgctgatgaactccgaagccaaagtcagactgggcaaggatggagacgcaggctacaacgaagtgcgccggcgtgcaggcatgagcaccaaaaccggtgttaccctgaaagacgtgatggacgaacgccggatggagctttgcggcgaatggtgtgcccgttatgtggacttggtgcgtaccggcgatgccgccaccgtactcggtcccaaaggatggacagcagaaaagacttattggcccataccagccaaccagttggacgaccttcccgacctgaagctggaacccattgacggaattgccgaataaatccgctccaatatggtaaaaagattcctaatcagttgtggaatagcctttgccgctctgacggcaaaggcaacccctgacgattccatcaaagtggtgaaggggcaagtcagtgactattatatcactgtaacccaagaccgtatcgtaaaaggacacgtactggacaccaaccgccagccactcacaggcgccacagtcatgttcttcgcaagtcccatgcacaataccactgcccacgacggcagctttgccatcaaaggagcgaagaacgacgtgcacctgtatgtctactatcccgggaaaaagatagtgaacagaatcctggcactggatgaaaccgatattgaggtagtgatggaagaagaggtacacaaggcaaccgcaatccgccgtcccgcccaggcgacccggtggtatgacccacaggcgcctctgtcgcgcaccttctgcaatccgatgaacatcagttacaatttcgagcctttcaacaacaatgtgcgtcccaacggttcgttccgttcctctgccgacccgatggcggtggaatacaagggagaatactttctgttctccaccaaccagggcggttttcactattccaagaacctggtggattgggatttcgttcctgccggcttccaacgcaagcctacggacgacgaccagtgcgcaccggcagcctatgtaagcggtgacacgctgttctataccggctccacctacgaaggccttgccgtgtggtacagcacacaccccaaaacgggacgtttcaaacgtgccatcgaaaagaatgtgcttcccacatgggacccctgcatgtttctggacgatgacggcagactgtatatgtattatggctccagcaatgaatatccgctaaaggcggtggaactggaccggaatgatttctatcccatcagcaagattcacgacgtgatgatgctccgccccgaagaacacggctgggaacgtttcggcatgaacaatgacgatgaagtgacactccgcccattcacagagggcgcttacatgaccaaacacaatggcaaatattatttccaatatggtgctccgggcactgaattcaaagtctatgccgatggcgtatatgtttcggattccccgctgggcccgtttgtctaccagaagcataacccgatgtgctacaagccgggcggttatgtgcaaggtgccggtcatggaggcacgttctgcgacgtgaaaggcaattactggcacgtggccacctgcatgctctccctgaagtacaagttcgaacgccgcatcggtctttatccggtggctttcgacaaggatggtgtcatgtattcgtccactgccttcggcgattatcccaactgggcagaaccgatggacgtaaagaaccctgcagagcgtttcacgggatggatgcttctgtcctacggcaaaccggtggaggtatcatctacggatagcatccatgcagcttccaacctgacggacgaaagtatgcgcacctactgggcagcccgttccggcaaccccggcgaatgggcggggatagacctgggcagcacaaagaatgtacgtgccgtgcagttgaacttctacgaccataaagcggttcaatacaaccgtgccatggatatttatcaccaataccgtatttttgcttccgaagacggaaaagaatggacattggtcatagacaagagcgacagtgacaaggattgtccgcacgactacatcgagctcaacgagccgttgcgtgcccgttatctgaaatacgagaatgtgcacatgcctacgggaaatgtcgccttgtccggcttccgcgtcttcgggaacggtgacggcgatgtcccgcaagccgtgaaaggactgactgtgaaacgtgacaggaaagaccgccggaatgcccttatctcctggcaacccgaagcaagcgcctatggctacaacatctactacggcaccgccgaaggcaagatgtacaatgccatcacggtactgggacagacggaatatgacttccgcggactggatgcggacacggactattacttcactatcgaggcgctgaacgaaaacggccgctcgccattgtgcaagacgacaaaaaattaaacacaagaaataaagatatgaaaaaaccaataatgatacatgtgctggctttgttcctgatttccacattggcgggctgtgcatcctgctcttccgacttgaaggaaaacgggaaagagaacggaaaagaggaaaagcccgacacagaggaagtacgtcccgaatcattcgcttcggatgacgaaatgcttgattacatccagaaggtacatttgaactacatgtgggacggtgcggaaccgacctccggactggcacgcgaacgcatccacctggatggggattatcccgaaaaggaccagaatgttgtcaccaccggcggcagcggatttggtatagccggactgctggtaggcatcgaacgcggcttcatccccagggaagaaggcgtgaagcgcctgaccaatattgccgattacctgaaacgcgccgaccgcttccacggcgtatggccccattggttgtacggccctaccggtaaggtgaaacctttcggacaaaaagataacggcggagacttggtggaaagctgcttcctgatgcaaagcttgctttgcgtacgccaatacttccgcgacggcaacgagcaggaaaaggcgctggtagagaagattgaccaattgtggaaagagatggagttcagctggtatcagaatggcaaggatgtcatctactggcactggtctcccgaatacaactgggaaatgaacttcccgctggaaggctacaacgaagcattgattgtgtatgtgctcgcagcctcctcccccacttatcccgttccggcttcagcctaccacaacggctgggcacgcggcggcggcatcaagtccgactctgccccctacggcctgcctttggaattgaaacacaacggagccgagaaactgggcggtcccttgttctgggcacaatactcgcacatcggtctggacccgcgcaacctgagcgaccgctatgccaactactggaacgtggtgcgcaaccatgccctctccaactaccgctactgcgtggagaatcccaaacaatacaaaggttacggcgaggactgctggggactgaccgccagctactctaccaaaggctatgcagcccactgcccgggcgacaacgaccatggtgtcatcacaccgacagcagccttgtccagttttccctacacaccggaggaatccatgcgtgcactgaagtatttctattccaaaggcgactggatttggggcaagtacggattctacgatgccttctccgagggaagtgactggacggtgcctcgctatcttgccatcgaccaatgcaccattgccccgatgattgagaactatcgttccggcttgttgtggaaactcttcatgagctgtcccgaggttcaagaaggattgcagaagctgggatttaaggcttagggatttacgatttgacgatttacgattgaagttagtatgcgacatgatggagcagctaagcttaagttgaatttctatatcactattcccctcccccttcagggggccggaggggataatcaaaattatatcatatgaagaaatacacattattagcagccttggctttctctgccctcaccgtgacggcaacgcccaaagaaaacacatcccaaggcaatccgcaggagatggataaattcattacggagctgatgggcaaaatgacgctgcacgagaaaatcggtcagctcaacctgccggtaacgggaaacatcgtcaccggacaagccaagagcagcgacgttgccggtaaaatccgcaacggtgaagtcggaggtctgttcaacctgaaaggcgtgaagaacatccgcgaagtgcagaaacttgccgtagagaacagccgcctgggcatccccttgctgttcggtatggacgtgattcacggttacgaaacggtattccccatccccttggcactctcgtgcagttgggacatggaggctatagagaaatcggcccgtatcgccgccattgagtcgagtgcagacggtatctgctggacgttcagcccgatggtggacatctgccgcgatgcccgttggggacgtgtatcagaaggcaacggtgaagaccccttcctgggttcagccattgcacaagccatgattcgcggttatcagggcaaggatatgagtgccaacaacgagataatggcttgcgtaaagcacttcgcactgtatggcgccggagaagccggccgcgactacaacacggtggatatgagccgcaaccgtatgttcaacgaatacttccctccctacaaggctgccgtagaagccggtgtgggtagcgcaatgacctccttcaatgaaattgacggcgtacccgccactgccaaccactggctgctgaccgacgtactgcgcaaccaatggggcttcgacggcttcgtggtgacagactatacagccatctccgaaatgatagaccacggaatcggcgacctgcaggaagtatccgcacgtgccttgaccgccggaacagacatggacatggtagccgacggatttatcggcacactggaaaaatccctgaaagaaggcaaagtgactgaggccgacattgacaaagcctgccgacgcatcctagaagccaaatacaagctgggactgtttgccaatccgtataaatactgcgacgtgaagcgtgccgaaaaagaagtgttcactcccgaacaccgttccatcgcccgccagattgccacagagacattcgtgctgctgaagaaccaggacaacctactgcccttgcaacgcaaaggcaacatcgccttgattggcccgcttgccaacacccgtgccaacatgccgggcacttggagtgtggcagccacagcagacaaatacagcaccctgctggaaggtttcaagaattctgtcggctccaaggccaacattctctatgcacaaggtagcaacctgatgtacgatgccgactaccagacacgcgccacgatgttcggccgtgaactgccccgtggcaatgaccaagaactgctggacgaagccctgaaagtagccgcacaagccgatgtcattgtagccgccctcggcgagtcctccgagatgagtggtgagagcagtagccgttccgaactggaaatgccggacgcacagcgccacctgctggaagcattgctgaaaacgggcaaacccgtagtattggtattgttctccggacgtcccgtagtgctgacttgggagaatgaaaatgttcctgccatcctgaatgtatggttcggaggtagtgaagctgcagacgccattgccgacgtagtgttcggagacgtttgccccagcggtaagctgaccaccactttcccgcagaatgtgggccagttgcctatggcatacaaccacaagaataccggccgtcctctgaaagaaggcaaatggttcgagaagttccgcagcaactacctggatgtgagcaacgacccgctgtatcctttcggctatggcttgagctacaccaccttccagtacagtgacatcacgctcagctccaagcaactgaatgcggacggcaagctgaccgcttccgtaaccgtaaccaatacgggcaactacgatgcagatgaaatcgtacagttctatatccgcgacttggtgggcagcattacccgccccgtgaaagagctgaaaggcttcgagcgcatccacctgaaaaaaggcgaaagcaagcaggtgaccttcaccattacccccgaattgctgaagttctacaactacgacatacagtatgtatacgaacccggcgagttccatgtaatgattggacccaacagccgcgatgtaaagactacgagttttgagttgaaataggtatagttttgcttttaggtaagagggcagtccgcgaaaaccgggctgcccttttttaacaccgtcaccaaatcttttttgcattttgattgttcagaggagaaactgaatgatttatccactaaaaaatcaatgtaatgaagaagaacctaaaccttcccaagaagaaaaccggaagactgagaaacctatttctgacggtgtgcctgctggcaagtgtcgccgcatcggcgcaggagaaaacagtaaccggtaccgtgaccgatgccctgggtgacccgctgattggtgccaccgtattggtgcagggaacctccaatggcgtgattaccgacatagacggccggtactccatccaggccaccccggagaacacattggatttttcctatgtaggcatggtgaagcaagctgtcaaggtaggcagccagtcggtaatcaacgtccagatgaaagacgactcgcagatgctggccgaaaccgttgtcatcggttatggcagcgccaagaagcgagaccttacgggctccatcaccaacattaaaggcgacgaaatcgccaacaagccggtggtcaaccccgtatccgcactgcaaggcaagattgccggcgtgcaggtgataaactccggcaaggcaggctccgacccggaaatccgtgtacgcggaacaaactccatcaacggctacaagccactctatgtggtggacggactgttcaacgacaacatcaacttcctgaatccgcaggacatcgaatccatggagatactgaaagacccgtcgtcgctcgccatcttcggtgtgcgcggtgccaacggcgtgattatcatcaccaccaagaaggcgaaagagggacagacacgcgtcaatatcaacggctcgttcggtttcaagtccgtcaccgacaaaattgcactgacggatgccgaaggcttcaaactgctgtacaacgaacagttgaggaatgaaggcaacccggaatacaacttctcggactggacgggaaacaccaactggcaggatgaaatcttccagactgggttcatcaccaacaacaacatcagcatcacgggtgcctcggacaagaacagcttctatctcggtgcgggctatgcttacgagcaaggcaacatcaagcacgagaagtacagcaaaatcacgctgaacatcagcaacgactataaagtgacggacaacctcaaggtaggtttccaattcaacggggcacgcatgctgcccgccgacacgaagagtgtggctacagccctgcgcgcagctccggtggcgcatgtattcaactccgagtacggcctctacacctcactgcccggattccagaaggcacagatgaacaacccgatggtggacgtagacctgaaggcgaataccacgaaagccgagaactaccgtggctcgggcaacgtgtacgggcaatgggatttcctgaaacacttccagttcaaggccatgttctccctggactatgcctcgaacagcacacggacatacaccccggttatccaggtatatgacgcaagcgtcgagggagacatagccacgctgggcaacggcaagaccggagtgtcccaagccaaagaaacggaaatgaaggtacagagcgactatctgctgacctacaccaactcctggggagaccacagcgtgacggccacagccggtttcaccacctactacaacaagctcgagaatctgaacggcgcccgtacccaaggggtaggcctggtcattccggacaatcccgacaaatggtacgtaagtatcggcgacgcagccaccgccaccaacggcagtacgcagtgggagcgctccaccgtgtccgtgctggcacgcgtgctctacaactacaagggcaagtacctgttcaacggctcctaccgccgcgacggttcttccgccttctcctacaccggcaaccagtggcagaacttctactccgtcggcctgggctggctgatgagcgaggaagcatggatgaaggacatcacctggctggatatgctgaaactgaaaggctcatggggcacactgggcaaccagaacctggaccgcgcctatcccgccgaaccgttgctgacgaatgcctactccgccgtgttcggcaccccgtctgccatctatccgggctaccagcttgcctacctgcccaaccccaaactgcgctgggagaaggtggaagcctgggaagccggtgcagaagccaacttcctccgcaaccgcctgcactttgaaggggtgtactacaagaagaaaaccaaagacctgctggccgaagtgccgggcatctcgggcaccgtaccgggtatcggaaaccttggctccatcgagaattcgggcgtagagcttgccttgagctggcgcgaccggataggcgactggaactacaacatcggaatgaaccttgccaccatcaagaacaaggtactgagcctcgtgcaggaaggctactccatcatagccggagacaagcagcagagctacacaatggcaggataccccatcggctacttctacggctacaaggtggaaggcgtctaccagacccaggaggagattgagcactctcccaagaacacactggcaaccgtcaccccgggcgacctgaaattccgcgacgtgaacggtgacggtgaaatcaccacggcagaccgtacgatgattggtaatcctacacccgatgtcacctacggcttcacgctcggcctgggctacaagaactgggagcttgccgttgacatgatgggacaaggcggcaatcagatttaccgtacctgggacaactacaactggagccagttcaactttatggagcaacgcatggaccgctggcacggtgaagggaccagcaacacccagccgctgctgaacaccaagcataccatcaacaatctgaactccgagtattacatagaggacggctcgttcttccgcatccgtaacgtgtcgctggcatacaacttcgacaaggcgctgatttcgaagataggcatgcaggcgctgaagctctacgtgaacatacagaacctgaagacgtggaagcacaacaccggatataccccggaactgggcggaagcgccatcgccttcggggtggacgacggcagttatccgatgccggcgatttatacgttcggatttaatctgacgttctaaaagcctctcccctaaaaaagagtaacttcaaacctcccccgactccttcaaagggaacggggaatgaaaaatataaatttatgaaactgataaaatacatatttacattgctggtgggtgcaacagccctctcactgacatcctgcaacgacttcctggaccgcgatccgctggggcagttcacggaagatgactctcccaacgcccttgtaggcgggaagatattcaacgtctactacctgatgcgctcgtacgacatcactgccggtattcctgcttttatggtgcacatggtgcgcagcgaggactccgagaaaggcagtgacgccggcgacggcagcaacgaggccgccatgtgggacgacttcgaatacactgcctccaacgggccgctcagcgcctattggggacagaactacaaaatcatctaccagtgcaacgaaatcctggacgacattgagaagagcggacacaaggacgacaccgaagccatccgcaaccgcggcgaagcgctcttcttccgtgcctggtgctacttcaacctggtacgcgcctttggcgaagtgccgctggtcaccatcaaggtagtggaagcctccgatgccaacgtgcccaagaccacggcggaaaagatatacgaacagattgacaaagacctgaccgaagccgaagaatgcctgcccctgcggtgggacagcgactatacgggacggctgacctggggcgccgcacgctccctgcacgcacgcacctatatgatgcggaacgattgggacaatatgtacacagcctccaccgaagtgataaagtcgggcatctacaacctgaatacaccggtcgacaaagtcttcaccgtagaaggggagaattgcggtgagagcatcttcgaactgcaatgcgaagccaccgatgccatgaaagaggatgccagcatcggcagccagttctgtcaggtgcaaggggtgcgcggagccggcgagtgggacctgggatggggctggcacatggccaccaaactgatgggagaagcctttgagccgggcgacccgcgccggaacgccacattgctctacttccgccgcagcacggacgagcccatcacaccggagaataccaaccagccttatggcgagtcacccgtatccaccgccatgggtgcctacttcaacaagaaggcctacacggacccgacactgcgccgcaagtacagccgtatgggtttctgggtaaacatccgcctcatccgctatccggacgtgctgctgatggctgccgaagccgccaacgagaaagggctgacgggcgaagccgccgggtatctggaacaagtacgcgcccatgcccgcggcacactggcagacgtgcttccgaaggtagaatctgccagccagtctgtgctgcgtgacgccattcgccacgaacgccgcgtagagctggcactggaacccgaccgcttctacgacctcgtgcgctggggcattgccaaagaagtgctgcaagctgccggaaagaattaccaggacaagaatgcactactgcctctgccccagacagagatagacaaatcgaacggagtactggtacagaaccccgactattgatacccggccaaaggaaacagccgacccaatcaatggcaaaaggtctatttcataacttgctttcaatcaaagcattgctactgcaaagagctgcaaagaagtcatagcaccactgcaatagagtgacggcaatctaaaaacaatgaagggaacatacttacaaacaattaattcaatatgaatatgaagaaaattttcaagagaacaagtctgctgctcgcaaccgctttaataggtggcaccgccaccgtgcaggcgcagaaatctccgcaggacatggaccgcttcatcgacgcactgatgcgccggatgactgtggaagagaaaatcggccagctcaacctgcccgtgaccggagaaatcaccaccggtcaggcaaagagcagcgacgtggccaagaagattgagcaggggctcgtgggagggcttttcaatctgaaaggagtggccaagatacgcgacgtacagaaactggccgtagagaactcccgcctgggcatccccctgctgttcggcatggatgtgatacatggctatgagaccatcttccccatccccctcggcctctcctgcacgtggaatatggcagccatcaagcagtctgcccgcatagccgctacagaagccagtgccgacggtatctcatggacattcagtccaatggtagacatcagccgtgacccacgctggggacgtgtatccgaaggttcgggcgaagacccgttcctcggaggcgccatcgcccgcgccatggtgttgggatatcagggaaaagacctgaacgaccaactgaaacggaacgacgaaatcatggcatgcgtcaagcacttcgcactgtacggtgccggagaagccggacgcgactacaacaccgtagacatgagccgcaaccgcatgttcaacgaatacatgtacccctatgaagcagccgtccatgccggagtgggcagtgtaatggcctctttcaacgaagtggacggtgtgcccgccacagccaaccgctggctgatgacagacgtgctgcgcaaacaatgggggttcagcggttttgtggtgaccgactttaccggtatctccgaaatggtggagcacggcatcggtgacctgcagaccgtttccgcccgtgcgctcaacgccggtgtggacatggatatggtgagcgaaggtttcgtgggcacgttgaaaaagtcgctcaccgaaggcaaaataaccatgaagacgctggatgcagcctgccgccgcatccttgaagcgaaatacaagttagggctgtttgatgacccttacaaatactgcgacctcagccgtcccgcacgcgacatcttcacccgcaagcaccgcgacgctgcccgccggattgccgccgaaagctttgtgctgctgaaaaacgaaccttttgagggacaaggcaagaagtcttctcgtcccgtccttcccttagagaagcaaggcaccgtcgccgtcatcggccccctgggcaatacccgcagcaacatgcccggtacctggagtgttgccgcacgcctggacgactatccctctctgtacgaaggattgaaagaaatgacagccggccgggtgaacatcacctacgccaaaggcagcaacctcatcggtgatgtagcctacgaggaacgcgccaccctattcggccgatcgctgggccgggacaaccgtacggataaggaactgctggacgaagctttgaaggtagcctccggtgccgacgtgattgtagccgccctgggcgagtcttccgaaatgagcggtgaaagctccagccgtaccgacctcgacatccccgacgtgcaacgcaccctgctggaagccttgctgaagaccggaaagcccgttgtactgaccctcttcaccggccgaccgctgacgctcacctgggagcaggaacatgtgcccgctatcttgaacgtatggttcggtggcagtgaagcggcatacgccatcggcgacgtactgttcggtgacgtgaacccaagcggtaagctgaccatgactttcccgaagaacgtagggcagatacctttattctacaaccacaagaataccggtcgcccgctggctgccggcaattggttcgagaagttccgcagcaactatctggatgtggacaatgaaccgctgtatcccttcggctacgggctctcatacaccactttccagtacagcgacatcgccctcagtaccccggtcatgggacaaaatggctccaccactgccgtagtcaccgtgaccaataccggtaagcgtgacggcgcagaagtcgtgcagctctatatccgcgacctcgtaggcagcattacccgccccgtacgcgagctgaaaggctttgaaaaggtgttcctgaaagcgggcgaaagcaagaccgtatccttcaagattacccctgagctgctccgcttctacgactacgacctcaaccacgtggccgagccgggagatttcgatgtgatgataggtggcagcagccaggcagaaaagatagcccgactgacactgaaataaaataaaatatttaatattgcactctaaaaacaagaaaacatgagatatactactttactcctttgtttttgcagcattctgctccttggcagctgcaagagccagccctccgcacagaacggacagccgctggaagtgatgacgttcaatgtccgcctggatattccttcggacagtgtaaacaactggaattaccgcaagggtgacgcctgccgtatgatagcctactacagccccgacttgctgggcatgcaggaagtgcttcacaaccaaatggaagacctaaaacgcgggctgccgcaatacacagcactcggtgtggggcgcgacgacggcaaggaagcaggcgaatactgcccgatattcttccggaccgaccggtttacactgttggaatacggcaatttctccctcagcgagcaacccgaaactatcggcatcaagggctgggacgcttcctacaaccgtgtcaccacctgggcgatactgcaggaaaagaacaacggacaaaagtttgtatatttcaacacccatctggacaacgacggaaagacagcccgcaaagagggcgtgcaactcattctcgacaaaatcaaggagatagcaccggacatgcccgccatcatcaccggtgactttaactgtacgcccggtgaagaacctctgcaaacgctggaaaagggaggaatggaaaatgccgcaaagacagctgccgtcacctacggtccgtcctggtctttccatgacttcggccgtctgccggtggaggaacgcgtactgctggactatgtcttcgtgaccaaaggcgcaaagatagaccgctaccgcgttatccaagacaaaccggagaacagttatctttctgaccactgtcctatacttgttgaattgaccgtgcaatgaatatagataagtaaatgataaaaaaacaagtaagcattggtacaatgaaaatacaatacagtttattattgttcctgctgttgctcggtttcacgcaatgcaaaagccccgccgccaaagaagaccggctgagcgacgatgccctgatggacaccgtacagcgccgtaccttcaactacttctgggaaggtgccgagcccaacagcggactggcacgcgaacgcatccacatagacggtgtctatccggagaacgaccagaacgtaatcacgtccggtggaagcggcttcggcatcatggctatacttgccggtatagaccgcggctatgtcacccgccaggaagggctggaacgaatggagaaaatcgtctccttcctcgaaaccgctgaccgtttccacggtgcctacccgcactggtggtatggcgatacgggcaaggtgaaacccttcgggcagaaagacaatggcggcgacctggtagaaacagccttcatcatgcaggcgctgctctccgtccaccagtactacatcgacggttcgcccgccgagcaagccctcgccgcccgcatcgacaagttgtggcgcgaagtggactggaacttctaccgccagaacggccagaacgtgctctattggcactggagtccggaatacggttgggaaatgaactttcccgtacacggttacaacgaatgcctcatcatgtatatccttgctgccgcctcgcctacccacggcgtgcctgcagcagtctatcacgagggctgggcgcagaacggggccattgtagaccctcataaagtggagaatatcgagttgcatctgcgctatcaaggcacagaagccggaccgctcttctgggcacaatactcgttcctcggcctcgaccccatcgggctgaaggatgaatactgcgccaactacttcgacgagatgcgtaacctgacgcttgtgaaccgtgcctactgtgtccgcaaccccaagcactacaaaggtttcgggcccgactgctggggactgacagccagctactccgtcaacggatatgccgcccacgctcccaacgaacgcgacgaccagggagtcatctctccaactgccgccttgtcatccatcgtctataccccggaacagtcgttgcaagtgatgcgccacctctacgagatgggagataaggtcttcggcccctatggcttctacgatgctttcagcgaaacggacaactggtatccgcagcgctacctcgccattgaccagggcccgatagccgtcatgctcgagaattatcggtcgggactgctgtggaagctcttcatgagtcatccggatgtgcagaaagggttgaaggagttggggttctcaacagtcagcaagtaacttactatcataaaaaatccccttctgaaacttgtattctctgatgaatagcgaggtacaagtttcagaaggggatgtatttacaacctattcaccgccgccaccagaaccactgccaccgctcttcacatcatcattgctgatagtgcgcgcagcctttttcacgcttgccttcaactcaccgatacggtagctgacgcttatgccgaagcgttggcggctgtacttataattgctttcccgtataaaaccgctgccttcggtggtggagctttggtccatatacttcttgaagaagttgctggcaaaggcagacaaggtgaggcgcttgtccaggaaggacttgttgacgctcaagccataatcaaagaagctgctgcccttaccttgcagcataatccacggcgtctgtccgaagacattcagactgatgcgccagtcatggggcagcgtctgctgtgcaccgccgtaggcaaagaggctccagccatcgttacgcatgccttcactgccctccagataagagtaattgccgctcatgttcatgtagatacgtgtacgtggagtggcattccagttgacgtagccgttcacactggcataacgggtcttgccgatgttggcataggtagaataaagcacatccttgcccgtgggattcttcaatccctcaatctccgtatcgggcatgagccttgtcacattctcaatactgttgttggtaaacgagtaacgggccgagatattgatgttgaacttctgtgtgaagttactgtaactcaagttgaaagcatggctcttctcgctgtccagctccggattaccctggctgatgtaggaggggtccgtatcattcagataaggattcagagaccagattcccggacgatagatacgcatgttgtatcctaaacgcagattggacatatccgtcagcttgtagccgatagaagcggaaggcactacgtcgtcaaagttctttgtgaaatcctcgccgcggcccaccagatacttcacatcttggatggtatgctcgtagcgtaatcccaaacggcccgaaagtctcttcaccttcagtccatatcccagataggcggcgataatatcgttcaaatgcttgtagtgtgaactctggttcttgttgtattcatactttccggtatcgtccgcatcaaaacggtcgtcttcggaggagttgttgcgcagaatgtacttggcacctgcctccaaggtatgcagcttgccgataggcgtggtatagtcggcctggaacgtatgctccgtggtattctgctcaccgtcgttatgctggttcttcaaacggttcagatagtccgcccaatcggggttatagccattgtctatttcatattccgtataggaatccgacgtttgcggacgggtgtttatcttgtaggagaacgtcagcatgcggtccttgaccttgaacagacgctggtagtcgatacctccgtcgatagaataccaggaagacttgctgcggttaaaggcagaataactgtaaatgggagcagcatttatgttctctggaaaggtggcgatgtagtccgtagagccgttactcttattcccaccgccccaaagtccgaaagacatggtaaccaagcgtaatgtatctatttcgtagctggcctccatgctgcccgactggaaagaaccgtgtcccttgttgctgccgtcatagtccagattggaagaattctccgtaacagcttccggtgtcacatgctggctaccactgctgtagttgcggggctggtcgttgtaattgtaattgtagcgggcgctgacggtcagctttccgctctttatggtaccgaatgccccgccgcctgcaccgcggttgctgacgttggcactgaacgtagccgtatagccttcgagtccgctgcccacggtgacgatgttcagaataccgcccacaccctcggcgtcatacttggggccgggattggttatcacttcaatatgcttgatactgtttgcaggcatacttttcagcacttccgtcgggttgttgctcatcatgttgttgggctttccgttgacatataccttaaagctgctactcccgttcacctgaatattgtcctcgccatccaccgttaccaacggtaccttgcgaagcatttccagcacggagttcgactgggcgtcagggtcatcctgcacattgtactctatcttgtcgatatctgccttcaccagaggcttctgtgccactatttccacctgccccagctcattggaggcatctacgatatacagcgtgccgaagtccaccagcttctcccctgccttcacagaaaagtccttcacgatgggagtacgtcccacggaagtgatggtcatcacgaagttgcccgtaccgggtactttctcctggaactggcctttcatgtccgttaccagcattttcagcgcctttgcaggggcctctttcttcacgattttaatggtagcataaggttcaccctcctgggtgagtgagtcgagcaaaattcctttaacctggaaagaagtgtttgccgtgttttgcgctgcaagcagtcccgaaatcatcagcatccatagcagcacagtccattttgttctcattgcgtttttatatttagtgactattcatgtttattgtcttggtattagacgtttcccgttcgagttttgtcacaatgaattcggcaaaaatagcccctttttcatgcatttacgagactttcggagttaaaaaagcaaaaagaaagcaatttagagaaaatagaagaaaagtaacagacagatatttgcggcaataacagagccgaatccccccaatatccacggccgcaaagggctttttccaccggcaaagaataacgcgtagcacatgtttaccgctatattgctgacaatagcctgcatgctgcaagccgtaatcaccagcaccgccacactgcccgttccttgaagcaggttcaggatgaaaggagtaatgtcactgaaccccgaaatgaaagagagcaagttcagtccacccgtgccggcatacaccagcgtatagtgggtcaagatagtgaacaccacaaacagcatggcaaaaatcagcgctaccttgaactccaacggattactgctgtcctcgtcctccgtggtctgcgtgccgtcgtccacccgtttccgcttggaatgcagataccatgccacggctgccgttaccaccgacattatcagcaggtagggataaatggccagtagcgtctcccggctgaaaatacctatcaatatcaagaaacggaggaacatcatgctgaccgccaacaacatggctgccacatattcgggagcatcctgcacagaagccttacggctctttcgcgccagtacggaaatggtagccgtgctgctgtacaagcctcccacgatgcccgaaaccagaatgcccgactcatggaaaacgtaacgcttcaacagataagaaaggtaggaaatgcccgatacaaccaccgtggccagccaaatactgtatggcgtcaggttgatgccgggaataagattctcattgggcagcatcggcaggataatgccgctgatggcaaggaacttggcaagcgtaatcatctcgtcgttcttcatgcgctgggccagttccgtgaaggtgtgtttcagctcggtgaagagcaggacggtcactatgaccatgacgtagaaccacgacggctgcgtggccacaatgggagcaatacagtaggtgatgagtgcaataatgatggtggttactccgaacacatggtactgtgactgcttcacataatagttcagtccgagcagcagtcccagaatggctcctcctcccatgaacagacgatagcccgtagggtcgaggatatagagcagatagcccagaatgcctataaaagtgaaggtgcggtcggtaccgaaaagcgtagtttccccttcgcgcttcaagctgattttacgctgtgaaagcccgatgagtaaagagaatacagtgaccaaaaggaaggtgaccagttctcttggcaggtagtcgtaaagtttctccatgacgattaaacaagtacggcatacaattggtttgctaccatgtggtgaaagggtgtttcatcagttgcgagttatagtagcggacatctcccgtcacctcccgtccgatgaatgcaggtttcacgaaaggctcgtcttccgaggagagttccacctcggccacagtcagtccctcattctcgccatagaattcatccacctcaaagacgtgctgtccgctgcgcaccaggtaacgggtcttgtcgatgatacccggttcgcacagcttcagcaattcccgcgcttcgcacagcggaatttccttttcccactcgtagcggctggttcccgattcattggatgcacccttgatggtgagaaatccccgttcatcgcggatgcgcacccgtactgtccgtccacgtacactgctgatgtatccttgtacgatacggctgtgtgcatacgcttgtggcttgtattctcccgtcacgaggaatttccgttctatctcctgcggcatgtcgtttccagtgattttatcagccccagtaagagtaagccacaaacatggcgatgaccaatacaatggctattactcccatcgtcatcatcactttcttggcttgttgctcttccttctggctgtgcattgctttctttttactttttcccatggtgtgttttatagtttaaagttcaacgatgaacaaagtaagaagaaattcgggaagaatgcaaatgaaagggagaaaatttattcgccacttcctgcaaactccatcaggtaagctttgataaagccgtctatctttccatccatcacaccattcacatcactggtctggaagttggtacggtggtccttcacgcggcggtcgtcgaagacgtagctacgaatctggctaccccattcgattttcttcttaccggcttccacctttgcctgctcggccatgcggtgttggagttccttgtcgtaaagcatggaacggagaaggcggagagcgttctcgcggttcttgggctggtctcgtgtctcggtattttcaatcaggatttcttcctcttcgcccgtatatggatccttatactgatagcgcagacggacaccggactctaccttattgacgttctgtccaccggcgccaccacttcggaaggtatcccatgacatgcgggcaggttcgatgttcacctcgatggtatcatctaccaagggagtgacaaacacggatgcaaaagaagtcatacgcttgccctgggcattgtagggcgaaacacgcaccaagcggtgtacaccgttctcacctttcaggtagccgtaggcataatcgccggaaatctcgatggtacaagtcttgatacctgcctcgtctccttcctgcaggttggcgatggtggccttatagccgtgagtctcggcatagcgcagatacatacgcatcagcatgcttgcccagtcctggctctccgtaccaccggcaccagagttaattttcagcacacagtccatctgatcggcttcctcgcgaagcatattcttgagttcgagggcctcgacagcagtgattgccttggcataggcatcgtccacttcctcttcagtcaccagttcgtctttgtaaaagtcgaaagccagttgtacctcgtcagtcaaggtctttacctcattgtagccggaaatccattgctgcaagcccttcactttcttcatctgagcctcggcagccttctggtcgtcccagaaaccgggagcctgggtgcggagctgctcttcttccacctgtatcttctttccttcaatgtccagatagcggttcaacgcctcggtacgttctttgatatctttcagttgttctgcggtaatcatatatgcatttacaatttaggaagtgcaaaggtataaaaaaacacataattccgcaattgtcaatccaataagtaatgctaacggcaaatgattccaccagaacaccctaaagatttattcaaaagacaaggtgccgaaaaaggccggacagtggaacatggggcgttccagcccgataggactccaagaaaggaagtggggagtctggagtttgtcaccacacttgtagaaattccctttcattgtttttccgtccaaagaaccgacggaatgctggaagaaagcggaaacgggaataaccatggccagttcccagctgcactcgcccaaacgttcctcgaaaggttcgccgcccaacgagctccaacgtttcaccatgcccagcacctcctgactcgccgtaggacggcgctcattgactgcacctccctgaatcagcagcctgccggcgcagttacattcgaaattgtaatagcggtcgtcaccttcgggagatacgaagaattccacacaagcatcttcccatacccggccattgtctccggaggccactgcacgcacactggcttccttcactttgtagtggagcaggatttcgcgccccgtatgggctatgcggaaactcacttccggcttgtagggataatctttccagttgaccacatcaaggggctgaaactctatcccgttctcgtccagcaaggacggcacagcctcaccttccggtgaagccgtacacattactttctttacggacaagctctttccactctgggcattgcaacaaaccatgcctaccattgaaaacaccaagagcagaaggagtttgctcccgtaatctctcactatcataaaacgtcctttcatttcttattagtagaagccttgtctgctactgctacatcccaaccggaaacaacgtcgccgtaaagatagaatgtcacgtcaaaagtagtcttgctattctcatccaccacttggtagcagcgtgtcgcgtcataggaatccacctccttgtactcgcccaatgccagcggagccggctcttccttgccggcagccttggctatgatttgctgcatgcgctcctgcatcagcttcataatgccttcatgcttgaaggggtcgggatccgccacttcgggatgggtagcctttatcaccccgccattggcggcacgcacggctctgacactgtccgtataagccttgaactgcctcttcacctccggagaacgcagtccatgaatggtaaatacggcaattccctgggcgccgttgttgagagcggcatccatgcattcgaacatcatcgggccgtcggtggcggtcatgccgcagtacagtgtagtcatatcgttcttgtcgcgtacattctcaaccgtacagtcggaaatgaagctggcatcgcccgtatagaaggtatggtaaaccatcgggaacacgatgtcgagattccatttgccccagtcctggcgcaccatgcgtgaagccatcttcggggtggggaacggggaggcagccattgtcttgccgtaggagtgcaccacttcggcaatcatattggccacttcggttatctggtcgcaacggaactggcgccacttcacatcgagggaagggtcttcctgctcgcgggggtcataaccgtactgctccttgaacaacctgagcatttccggatggtaaccgtaatcccacgcagcgtattcacggtcctgcacaatgccataatggggccacaaggtggtgggaagcaccacatccacaaaacgatgatagtcgatggcaatgccattcaagccttccacttcgcagtaggccttgattttttccttgatgaactcgcggacttcgggcaatgccgggcagagaaacttgtaatagcctacataggcggtagtgtctgccaggctcttgccgttacgattcacgctgaaccattcgggatgctccttcaatatcttgtcacggtcgtgttccagattcatggtccataaccaggcatacacttcgattccgtgtttatgggcaaccggtatagcagcccggtaatcgtcggaagtcggcgcattcagcataattccatccatgccgatgtcgttcatcacttggcagatggagtcgaagttcatgccgggacgatagtccagccacgtccagaacatgggatattccttggttgtttccttagctccctgctggcacgagaacatgcccagcgcaaggaacagcagcaagaatgcaggtaaaaagctctttttcattctatctaaattttaagtttaacatgcagtttttccatcacccacgtaacgccgattaccacaaaggcaaaacaaaggcagttgaccagccccatgaatccatgtgtgaaccagtccggcaggacaacaccggtcacatcagcaaagccatagaagacataaggcaccagataagtggtcagcgtagccgttccggcagggcgtatcaggttgaaccaacctgtgacctgatggctgaccagatagccgagcagtgtgtagagccccacggaaatggcagtcacatagaacacccagggaggagtgccacccatcttggccacaatccagaaatggtgtgtcccaattccgaccagcagaagcagaacggcaaccgtcagcccattgcggagtttccagccgtcacccttgccggcatagcgggcgctgagaatggaaaggatgacacctcccattgtaaatgcgggcaaagccccgttgccgatatgcaggatggacaacatgtcctgatagaagttgcgttcgggaaaggcaaggatagcctcaccgccaaagccctcgcgcaaaggcgtacccagcaggcatatcaggataaaggcaccccaggcaggcagcagatactgcaaccggtcacggctgaaaatatagattacggcacataccagataggtccagccgatggagcccaatattccccaataggcaccgaatacacctccctgcggattgcggaacgtgaaggcaaggtaaaggagaaccaatactccgattattttaaaagcacggaaaagattcttctgagtgccggaagccggtttcggatattggttccacacaccgataaagcctatggccatcaggaaccagtatactcctatcggatagggagcttccggtgaaagccggaactccgagttcgttataaacgcccccatcaccagcaaggcaaaggtgcgggaaaggatatgccccaaggtggactctgccgagaagcccttggcatatctgcgctcaatggcgtaaggtatggacattcccactgcaaacaaaaagcaggggaatacaatatccgccagtcccataaaatcctcaccatagacggcatgttccagccaatggggtacgtcatgcactttccagaagtcattgacgaaaatcatgatgaacatggtcaatgccctcagcatgtcgatggccaggttgcgccgtgaataaacagtcttgtcactcatatcatcttgctttagaattcagaaaccaacatcagccatctggctgccgaagagccccacacctctttataagtagccgtattgaactgtggccaatagggcgcgtcctcattgaaataggactgcatgcctacgggtatctctcccaccgtttctccgggcaatgccgtgtagagctgcggatagttgctgccttccccataaatcatggactgcccgaaaggattccggcctacaacccagaagagctgctgttctgcaatgtctttcagttccttgtccttcagtaccctggcacagatagcggcagctttaccggtagacaaatgtacggcaatatttcccttaaacgagaaccagacggggaatatgcgcaaataatgctctttatccagacggataccgttttcgagctgttcctcgaaatccttatcggcaccgctgcgaatccctacctgaacggcgtagaagttggcggaatccttcacttcatctttgtgatagatgccactgggcaccattccataaggatatacatacttcatgatattcttcagataaccgccatagagtttcatggcacgaatccactgctcatactcggcatggccggactgtgtctcgcaaagggcggcaagggcttccatataggcatagtcgcgggactggtgggtatagtgtacaatggacttcctggccaaatcacggtagaagaagccgcaggtcttgtctttgtctttcagcggttcggtgcgctggcactgcaaggtgtagcggatagccttcacggcctcatcggcatactgctgttcgccggtcagcttgtagagcatgctggctgcccatgaaatattggcgtgatactggctttcggatgccatggcggcatgtcccccacccttctttatcagttcggcaaagcccaactcattaaagcgtttcatggcataaccgaagtcttcctttgcaatctttttcagattgctcctgagggcttcatccttctcaaccatcatggaggcatacgcttcaattcctgcaagcaggaagttttccaaagctccgttatggacaagcagttcacggcggccggcatcgtcgtcggtgcctacctcaccgtcagtccatagattggtaccccatgtctgtgcacggtaaccatcgcccagccgggtcttcatcacatagtccattccccacaaagcctcttccatcaggcggttgtacaagtcgacattgcctttttctttggcgcgttcggccatcaagagcaaggaataggctatttctcccgtctgtaaggtctgttgggacatgtcggcagcatcgtgccatcctccgtttataggaataatatgtccgttgtaagtggcatgcaagtcattatgacaagccccgtgctttccgggaacgggataaccgcaacgctcgcagaacaggaagttcaccatacgccaggcagaatcctcccacacatcctgatggatatagaaaggcaaggtggtgacatcccctacctgaatgacgtaacggccttgtgtcttgaagtccgagaagtctatcgtctcgaactctcccaggccggtcttttccttacgaacaggaccggtataaacgatggcctgcgtagcggcatccttcaactggaactgtccgccgtgcttttccacattgacaatggcgcttttggggctctctatactataaccggtagtagagaagataatgcggttctgtgcaggcatccagccttttacggtttccgggttctccaccttctgaagttccacggcatctacatcgaagcgaaggaagtcgcccatagtacgttctttgccgaacacttcgatggcaaatgaaatcttggttaccttgtcgcgcgccagtccagacatctcgacgaagcattcgttccattggttatttttcagattgatttcgtggtagccttcccgaccgtaaatgtcgggtacttttatttctccgtcattctccacataaaggttgaggtagatgctgcgtgctccttcgcacgtgggatagatatagaacttcaggcggttgtaaccttcccagttcacacctcctatatcataagaggccatgcaagtaccgcgtcccaacccccagccgagaatcttttccggatgggcgggcgcttccaggcgcaggctgtacttgccggacttgctccgttcgtcagtcaaaccaatcttaccgatgcccttgtgcgaccatttggagaaatcctccatatcacacagcatcacagtttccaacactttctttttcaagccgaatgtctcgaaagcctttgtctcgtcgagcggcaacggactgtgcacgtagcccgtgctgacgatgtcggctttcaacttttcatctacttgggcatgaagcaaaacagccggggcacaaagcagaccggtcaacaagcagagaggtttcatgagtttcttcataatatattttttaagattaaatcaggctattgaaaaaatggggttcagtagcctgattgtgctaagttaagaattccccttctataaaacaccaaattagtcaatacgtgacaaattggggatttgttctgtataccacctagttaagatatacttttctccataaatagttgtgaatgtaacataagcagcagaagtatatggacttccaaaaacgacatccgctgaatcatcattaatacggacgacccatccaccagacatactccagtcttcataactaacaatcggatgactgcctcgaacgctcaacctatatacatcaactccccaatgcttcacttcttgaggataacccacaaaatctgcagtaaaagtagatggatacaaatattcaatagctttcttgtctccctcactaaacccagaccattgatattcggcagttcctccattcatcacagaataggaatcagaatcaggcgttccataaatgtcataagcgttagattcattccttgatttccaatttgtatgtcttagaccaaagcaatgtcccaactcatgcaccatattgtatatcttctgaagtcttggaatggttttgttataatcataatccaagtttatccaaatagagggacctggttttccgttcataggccaagagcctgccgcaatagcattgttcggtaaaggagtgctggcatcactacggataagtatatccggattagcagctgtagtataagtcattttaaggttactcagaggattccacagattgatggcttcctgtatttcatctcgccaatcatctacacctgatgcaggtatcgagctatcaacaccaacggtaatcgctctttgtttggggtgaccaattaaaccggtagtatgataagcttgtcttgtttgtggctgaccataagcaacaagtttacttttttctatatatatatcaccttgaatcagatatcctgattttagttttactacatctaaagtatcaaatccaagtgattggattatgcacatatcatctccgatagaggcgggtcgttgtggcttttgtttttcaaagctaactgcttctaatccattatcacaagcacttgttaatgctaaaaacattgaataacacaatatgaataaactgttccgaatatattttgcattcataaaaatcaagtataatatcaaatattgtataaggagaagtatgagaaacatatctcagacttctccctattttcatttatcaaagattattttttccagaactcttttatctatgatacgattagcctagaagttcggtttatctatatcccaaaatacacgagtacccgcattatcaggaccacccaatttggaaaccgcatccgcatagtcgggattagtagttttctcagccaatgtgaaaggcagacgacgaggtcccaaatccgtgtcaatctctccctggctatagttaacatcgttcttgaaaagcttaggataacctgtgcgacgataatcggcccaaccgttgataccttcggggaagatagcaatccagcgctgtgtggcaatcttggcaaacttctcttcgttgctcaaagcatcgttccacttggctgtcaccttgctgacagcttttgtagaagctgtcggcaacaaattatcgttatggtcagttgcaggagtttcaccttcaaggtagtttccaataactgctccccattgttcgaacgaagtctgtacccctctttcataaaggctttttgcggttcctttgccgttaacgttccaaccacgcaaagtagcctcggcctccagtaaaagcgtttcactggcagtaaccaaaggaatcgtttcatcaatttttgtagcaggcgaacttaccttgccaaaagccacgtctttaaaaccacccggaatatcaacacctgttctaaaaccaacgactttaccatctatttcattggccatcagcttcaaacgagcatcgttcataccgcccaagatagaagtcatattcgcattcaaactgcaatcgccccatgcaaccaaagttgtcaacggattagtatagcctttaccagagaatttgaggttgccatcgttggtttcaatcagaccattagaatcgctcatggcagcttcagcttctgtctgcgcccaaacggcatcaaacttcactacacgcatagctaaacgaagacgcaaagagttgcacagcttggcccacttggcaaggtctccaccataggcaaggtcgaaggcaccaaaacctaccactgatttcgtcagagcgtcacgcaatacatccgcagcctctttcaattccttaaagaaagctttatagaccacatcaccggcatcgtatttacctccggtggccgacttgccatattcagaatagatgatgcaaccgtattggtcagccgtacgcgacatggcaagcacgcggataatggtactgatggcattgaagtgagcataggtatccgggtcttccgcacattttttctgtgccttcaggcattccgacatgaccgtattataagcataatcccagcagtaatcgttccaaccggcattcatggaataagtcatattattgacattgccattaaagggattgatacttgacatatagccggaaaacatgtcggcatgcaagttctgcgtcaactggaattcccagtttccaccgctggtattgtaataaaccgacttcatcataggtacaaaatgagcacctatataattaccgtcctgtttcagttcttcgtccgtaacccctttgggatttgtattcatatcttcaaaagctcccgtacaagcagtaaggaaagaggctgctaaaaaagcaatacctgtatattttataaatttcttcatatttgctaaatcatttaaaagttaaccttcaagttgaaaccaaacgagcgattagtcggcataccgaatacatcgacaccttgcaaacgattgctggtagacatcagaccgtccgggtcgtaaggagcattattcttgaagaagaacagattgcgccctatcaaagaaatttgtagccctttgatgaagccggttttggcaagcagtgcttgcggcaatgagtaagagagtgacaattcgcgcagacggatgttggtagcatcatacatatagtgttctgtcacaccggcacgtccgcccaccacattgtagaattcctgaatattccggttgttttttccaccgtcgatgcgggttccttccaacataatgtacccacggtcacgggcatcacccgatatcttgcttacaccttgttgatccaagtcagcttctgtcaatgacatcacatcaccgccaaaccgtccatcaatcaagaagtaaagagaaaagtccttccaagtgatggtgttgctccatcccaaattgaagtcaggactggaattgcccagcttcacgggatccttattgaccattggaatagtcatggtctctttcgttccgtcaatttccacttctttcttctcatactgaatcttgccattgtcatcgcgtacaaacgtagtaccataaatatcaccgaacgagccgcccacttccagataactccatacattattactttcaccaccgttgaacataaaacggtcaagttcatccaccagtttgattgcttcattcttgttggtggcaaagttcacacctgttttccaacggaaatccttagtcatcaccggagtggcattcagcacaatttccacacccttgttttggatttcaccggcattgacataataacgcgcataagaagaaccggtaggagccggcagattgaaaagctgatccttggtacttgtcttataataggtaaagtcaaactccaaacggctattgaagaagcgccattccgtaccgaattctatagaagtagttctttccggtttcagttcgtcaaacggggcagtagtattaaagtttacattaccatttttgctaatagaattgagtggatgagaaatataagaactcaatccgttacccacttgcgaccatgcaccacgaattttacccaagtcaatccattcgggtagtttcagcgtttcgttgagcaaccaagtcacacctaccgacggatagaagaaacctttgttcttgtatttagtgaatgcaagtgtggaagtccaatcattacgagcagtgacatccaggtaaagttggtccataaagcctacctgtccggtgaagaatactgattgcgactgcgtgtgagtcttccaatcgctcggaagacctccgttcacatccacattacctattacaaatacattcggaatggaaagcgtacccggataggagtcaaatcccgtacctctaccggtatagtcatttatactggcaccgaccgatgcattcacgctaaacttctcgaattgttgctgataagtaaacagaatatcaccataagtggtcagttcactgccttcaccatagatataacgaccattggaacccgtctgctgggcgttcagacccgccaagatagagctggtaccggcatacatatgcgtctcattcttgtcgttgataaagtctgcactaccacgggcttgcaggctaaagagtttgttaaactgatactttacactcagattaaacatggcacgataacgggtatcctcattaggaactttgttaatcaaccaatatggattctgctcaaagtcacctgcacctacactggcattctggtaccaagcttgatccatcatattacgagacggattaagtacttgatagttctctttatagtagttgaagtccttgcccccttctactccaccacgtgggaagtgataaagtcctaccaaaggattcatgtagtaaccaccggaagttacacggttgttaccacgctggtacataccattaatattagcatcaatagtcaacttgttattcaagaaattggcagtttcgcggaagttgaagttatgcttcatcagacgattattctctaccactccttttcctacagtattggcatacgagaaataagtctgcatagcctgcgaacccatgctcaaagaaagagagttgatagtagttacaccggttctgaagaactcgtcggcataatcgggactaccgttgattttactaccccaactctgaccagtacctgtataatggttttgaaactcgggaatgccataagccgcattatcaatcgtcgtacttgagttgaaactgatactggcgcgtccctcctttcctttcttagtggtaataatcaccacaccattggcagccgaactaccgtaaagggcagctgcggcaggacctttcagtatgttcatactttcaatatcatcggggttcagattggaaataccgtctccacggtcgtagttaccgctgtcgttgtttccgccgatggtagtagccgtactttcgttggtggaagagccgaacggcacaccgtctatcacatagagcggctggttacttccgcttaccgaacggttaccacggataatcactttggaagaacctcccagaccggaagaactcttattgatctgcacacctgccgtcttaccggccaatgcgttcatcatgttggggtctttcacgcgtgccagttcatcaccgttcaccacctgggtagagtaggtcagtgatttttctttctttgcgatacccaatgccgttaccaccacttcgtccagcaatttggcatcattcttcaatgtgactcttatcgtccccggagtgacgggaacttcttgtgttatcatacctacgaaagacacttgcaggattttcgcacctgcgggcgcatctgtaatagtgaatttgccgtctaagtctgttacggctccggtagtgcttccttttaccaatacggaagctccgataatcggttcattgtcctcagctgaaataacgataccggtaatgggggaattttgggctgctacccaaccgatggctgccagcaggcaaaccaaggtcagcataattctttttttcataagctgtttttcggaaaataaatattagattaaatgtgtgttaagttaataaacagattctgatggggtctgtctttccgattgacaagcagggttgaatgtcaatctcatttgtttctttttgtatgctacataggctattagaatgttacggttaatactcgagcttattaaaatgtctcttattctgcagatttctttttaagcttcgtatataaaaccgggtagagaaccgcaaccctatcgagaaacagaagtttctttgctaataaaagttaatcgggttcggaagaagaaggaaaaactaatacgattttcttaatgttgccctcaccgccctcactcacttcccgaaccgccctgttcatcggcattacatgggtgagtgagggcaaataaaaagggtgagggcaaattttgccctcaccggtgttcggtctgtcccgttcccttgctttctcttgtctcgtccccttttttctcttgttgtgtccgcttctttgtcttatagaggctttgagtttctgagcggctcactatagtggtctgactcgttcactatagtgaacggagttgttcaccatagtgagctgatttgttcacccgagtgagccgacaatgaacaaaggctgtttcggggacagacaccaagcgtttgagggataaagcaacggggaaagacggactgaacaaggggagcgttccggactacgtgcttgaatcccgtgacagatgacaaacggttcttcccctttatctttgaagaagctgttttgaaatgataaatccccatttatctaccaggctgttttttaagcctaactaacgtgcacatactcgagagtcctatctgccaagggcaagtccatacataaaacaaaccgtccggcccggaatgaaaataattcactccaagtcggacggttcaaaaacaaacaaatggaaatctattcctcgtacatcttgtcaatcagctccttgtagttctttgccacaacagaacgtttcagcttcagcgtattcgtcagttccccacgctccatgctgaatggttccggcagaagcgtgaaacgcttcacttgctcataatgggcaaattgctgctgcaaggtatcgatacgggcacggaacaacgcttgtatcttggaatgttgcagtaactcatccatattgctgtatgcaatgcctttctccttggcataatccttcacaaagccataaacgggaactatcaaagcggaaacaaacttacgctcatcggcaatgacagcaatctggtcaatgtaacggtcaatagccagcttcgtttccaatgcctgcggtgaaatgtattttccgttggaagtcttgaacaagtctttgatacgctccgtcagatacagatggctatccttcaaataaccggcatcacccgtgtggaaccaaccgtcacggtcgatggcagcagccgttgcctccggtttcttgtagtagccggtagtgatagtcttaccacgaagaagtatctcgttgttctcgccaatcttcacctccacatcaggcatcaccgtacctacggaaccaatctcatagccttcgttgaggaagcaggaaacggtagccgtagattccgtcagaccatagcccaccaccatgtttatacctacagaatgcacaaactcgcagatttcatcgggcacagcagcacctgccgtagggaagaaattaccgttctcaatacctatcgtcttcttcagcagagcataaatggtcttttcgtagaacttgtatttcagatgaagcatcatcggaggagtctttccttggcgcaaataatcaatgttatgcgtcctgcccaccttgatggcatccaacatcatcgccttacgcagaccggtttcctgggaaatcttctcctgcacaccggcatagactttctcccaaaaacggggtacactgcacatcagtgtagggcgtatctctttaatagtagtttggatatcttgtggacggagattgatgcagacctgcactccccggtgtatacaaaggtaggtccatgccttttcgaatacatgggtcagcggaaggaagttcatggaaacatcctggtctgtcatgaaaggcaatcggatatcatgaatgcggaaagcctctctataattgaaatgatggagcatgacacctttcggctcaccggtagtaccggaagtataaaggatattggcgaggtcatcatctgaggcagctgctgtacgttcttctacaatggcattgtgctgcaactcttcatccattgccataaattcatcaaaatagatggaagtcatgtcgcgcggatctttcaccacagcacggtcgaagatgatgagctgctgcagagactggcaaaatccgaacacgctgaaagcggcatcgtactggaactgctcgcctacaaacagataacgtatctgtgcatcgttgatgatatactgtgcctgggccggtgagctggtagcatacaaaggtatagtcaccgcccggttggcgaatgcaccgaaatcagtaaagagacattcgggtttattctgcgagaagataccgatattctcttgtggctctattcccaaagccaccattgcattggcagtccggcgtacagtctgtgagaactctttccaagagatgggtatccattgtgcagtttcatagtccctgtatttcagggctattttgtctccatacttctctgcctggcggtgcaccaggacagataaatgatgataagtcataacttttgatattggtaaatacggtacaaaggtagtggtttcatttgaaactaatttgatattagcgggtaattattcaaactttacctttaaagtatccgaccatccgttagcaaattatccacaaaagatactttctttaccattaaaacaatagaaacatattaaatatctatatatttgtggtgatatacaaactaaatcaaattcaatgaacatgaaaaaagtattgcttttaatggttatgctgaccataggtttagcaagcatcaatgctcaagacaacctcagatggggagcaacagtcggcatgaactccagtaacttctccattaccggtttcgacagtaaaataggctttcatgctggggtaaaggctgaagtaggattgcctcaaatttcagaaggagtctacctcgatatgggtgcattacttacgctgaaaggagccaaaatagacggaggctctgctgcttctatcaagttcaatccctactacctggaaattcctgtacacattggctataaatatgcagtaaatgagaactttgccatattcggcaatgccggtccttatttagccatcggtctttttggcaaagccaaggcggaaggagatattcttgacgaatatgagtttgatgataactccaccaatgtattcggggatgatgccatgaagcgttttgatttcggtctcggattaaaagccggagtcgaattcagtcagaaatatcagatttccatcggttatgactggggactggtagagaacattaaagattcaggcaacaaaaaccgcaacttgatgatatcactcagttgcttcttctaaacaatattgaaaaaacagaaaggacgtcggtttggcgtccttttcattttttatccgtaagtttgcggccagattatttatttaccgaatatgatttacgatataccgactttaacttccgaagcaatcggattgctcaaatcactgatagccattccttccttgagccgcgacgaggagaaggcggcagattatctgcagaactatatcgaaatgcaaggcatggcaacaggacgtaaaggcaacaatgtatggtgcctcagcccgatgttcgacttaaagaaaccgaccttgctgctgaattcccatatcgacaccgtaaaacccgtcaacgggtggcggaaagatcctttcaaaccaacgctggaaagtaatggaaagctctacgggctgggcagcaacgatgccggagccagtgtagtcagcctgctgcaagtattcctgacattgtgccgcaccactcaggcctacaatctgatatatcttgcctcgtgtgaggaggaagtatcaggcaaggggggaatagaatgcgtattgccggaactccctcccatacagtttgccattgtaggcgagccgacagagatgcaacctgccattgcagaaaaaggattgatggtgctggacgtaactgctaccggaaaatcgggacatgctgcccgaaacgagggagataatgctatatataaggtattggatgatattgcctggtttcgtgattaccgtttcccaaaagaatcttccctgctgggtcccgtgaagatgagcgtaaccatggtaaacgccggtacacagcataacgtcattcccgaccgttgtacttttgtcgtagacattcgtagcaacgagtgttatagcaatcaggagctattcgatgaaatacagaaacacatcacgtgtgaagccaaagcccgctccttccggctaagctcttcacacgtagctccggagcatccggtagtgcaaaaggctattgccatgaaacgtactcctttcggctcgccgaccttatccgaccaggcactgatgccattcccttctctgaagatgggaccggggaaaagtgcccgttcacacactgccgatgaatttatctttgtcaaggagatagaggaggcgatagggatgtatctggagctgctggaaggagtaaaaatttaaattatcattatctgttcagccacggctccggattcagtttttccttctctttcctcaattggaagtgtagcaccgtacgaccattgtcggccccatccgagaagatttgtccgagggtctgtttggtggtgacatcatcgccctgcttcaccgaggccgatgacaagttgcaatagactgatatataattcccgtgacggacaaggatattgaacagtccgttcagtttaaagacagccgccactttaccattgaagatggcacgggcttgggcacccggtttcccttgtatatcgatgcccttattgtccagcttgacattgcgcaaaccttccacagaatactggccgtaatggctggtaatgatatacgctccggtgatgggcatcggcaacttaccgcgattattagcaaagttccctgataattcacggtctgccttactcatggagtaagtttccaaaggctgtgccttcggctttgcgggcgtagaggcagttgccgttttttcggttttttcaccagcctttttacgtgcggctgcctcacggcgcgcttcttctgccgcacgcttacgcgctttctctatttcttccgctatcagacggtcaatgcgtgcattgagctgattggcttcacggcgtttcttattcagttcgttctgtaagccccgctgtttctttttcagattggctaccaacaacttttgttccttctcctgcgcttccagcttgactttctcctcttcacgttctttcaacaatccttctttggcaaccttcacttgctgaagctcagtcttcttacggttcacctgctcctgctttttcaacacttcctcgccttgcaggcgctgataagtagcatattcacgtacatagcgcatgcgtcgataggtctgtgccaggctcttggcagagaaaatgaacatcagcttctcttcaatggagcggttcttatacaaatattgaacggacgattcgtatttcttcttcttgtcccttaggtcacgttgcaggcgggtcaactgacgttctaatgaagacaactcgcgctctatggattccacatcattattgatagtcagaatatagcgtttgcgctcttctatctgtccggtcagtgcagcaagaccgttcaactggcttcccacatccttcttggtggttatcaacagcgtttccgactctgctatctgtttctgcaaggcaccacgcttgctttccagttccttaatcagcttgttggactgggcaaggagcggagaaaccggcaaaaggaggagaaagaagagaaggagaagcttcataagttatgagttataagttatgagggattatctgacaattatcaactaatcaaaggtccatcagcatttccagcagttcttccagctccacctctttatatttctgtgagagctgggtaggagtcagtgcaaaaggcttatccgagaagttggaaagttcaatctttcccttttccagagagggtatcccgagttccttgccggtaagcaccttcttgccattgggtttggaagcagcataaagcagtttctccaaatgggcaaaatccgccttcttgggcagcacatccttcagttccttacgtgttgcacggacataacgttttcccatacggtctaccaacagaatctcatccggggtgacttccatacgtgccacctccgtacgaagtatcggcatcagaaaggaaatctgcatgcattcttccttcttcaacttcatcgtaccgttcacagtaagggtggcatctttatggggtaccgtcagctgcactttggaggaaaggcaggcagattctccggacagagaacttgagtgacgcgaagtcttgcaaccggcaagccccacagccagcaacaacagcaaggacaacaggcggcatatccttgccatatcattcagcaggtttagtttcatctgatatatatttctttttttgtattttctgtttcaacgtatcagagcgattgcccttatcccaggcttgtttccagtatttcaaggcaccttccgcatcgccagtcatgtaatagatatctccgcaatgttccaagaccacgtcactgctatctttatcattctttatcgcctcatctatgtagagacgcgcctcggcataattacctttaacaaacaatatccatgcatatgtatcgagataggtggaattgttcggctcggctttcactgtcttgtagctcatctcttccgccttgtccaagtcgcggcgctccacggaaagataatatgcgtagttattcaaggcaccgatgtttgaaggattgtacaccaaagcggaatcataagccgcataagcttccacatgcagattcttggtgtgataagcatcaccgataatggcataaaaatctgatacgacctccttcttgctgtcgtccttgacatgcgacaaagccttttgacagatggcaagggcatcatccgtccgttccgcctggttgtaggcaatggccagatagaaatagaactccaacatatcgggattggactccacaccggcttcgcacaaattcattatttccttgtaatcctcctggcgcacagcttcccccagcaatgtcatacgagccgctgtgttggtagggtctatcgccagaacctggcgcagaaccggccctgcctccttgttcattcctttggaaagaagatattgggcatacagcaaaggtaattgcgcctcatcgggctcctgctccatgatgcggttgaagagcgtaatgacacgtgtactgtccttgcctgcctgctcattctgcacgatgaactgccgcatcacattcagtttggtgtccgaagccactttcttgttcagcaacagcgtgtccaattgctgttcatacagctccttctgtccggtctcttcgtagtaagaagccaatgagtacatggccattgcattgtccggctcttcggccagcaccttcttgtaaatctcataagcttcctgctttttcccgttctgcatatagacatcccccagcacaacctgatagcgcatatcgttgggatactcttctaccagactttctatttcatgaaaggcgctcttgtcgtccttcttttgcagatagatgcggaacttctccatactgagctgttcattcttgcccatccgttcctcgagcttgttcagtataccgataactttgtcatactcttcctggcggttgtaaatctccagcaagttgtatagcgggtccagcttatccgagaaacgtaccgccatattttccaacaaggcagcggctttctccgtttcgttttgctgcatatacagattggcaagtccctgggcataccagtaattatggggagcattctccaccgccttttccaacgcggcttgtcccaacggcacctgcttgaggtacatataatactgggccatctcatacaaagccgatgatgcgttcgggtttatcgtcaggcaatgttgcaggacatcgaaagccgcatcatagtctttctggactttcagacgggcggcttcaagaaagaagtagtcgtaacggcgctgctgttcgggggtaagctcctttacgggcgaaacgtcggctttcttcgacttcttccgtttcttcaattccttccgtgccttttcagaccgaccgtacccgctcattttctccttagaagcttgaacattggcagcctgcactccgtacgtagtaaagcagaaggtacctatcaacaacgcaagtattatttttactctgattctcatctatttaattataaattcttaacccgtaaaacggaacaatatccattcattttttacccgtatgcccgaagccaccggcaccgcgctccgtctcatccagcacttccacttcctgccaaagagcttgttcgtgacgcgctatcaccatttgtgcaatcctctccccatcttcgatgacgaaggtttctgcagaaaggttgacgagaataatacaaacttcaccacggtaatcggcatcaatcgttccaggggagttcagcacggtaatccccttcttaatggccaatccgctacgcggacgcacttgcgcctcaaatccttccggaagagcgatataaaggccagtaggcaccagacaccgctgcatcggagccagcgaaatagattcattaaggtttgcacggatatccattcctgcagacagctcagtggcataagccggaagcggatgctttgatttattgatgatttgtacgttcaacatgatgttatttacgatttgacgatttacaattagggctacttctattcttacaattcgagtaattcaagtttcgcaattcatctccgtttcactataaacttgggcgaaaatacggctttttatacaaaatagtgatacatttgcagttaaataatagtaacttcaatcgtaaataacatcatgatgaattggaatacgctcatatctgccaaacgtttcggactggaagagtttcatcaggaacgccatgaaaaccgctcggaattccaacgtgactatgaccgccttgtcttctccgcccccttccgccgtctgcagaacaaaacccaggtattccctcttcccggtagtgtattcgtccacaaccgattgacgcacagcctggaagtatcatgtgtaggtcgctcactaggcaacgatgtatcgaaagctctcattgcccgccgtccggaactgcaagacagctacctcaccgaaataggctccatcgtttccgccgcctgcctggcacacgacttgggaaatcctcctttcggacattcgggagaacgagcaatttccacctttttttctgaaggaaaaggaatgtccctgaagggccaactgacacctgcccaatgggaggaccttactcactttgaaggaaatgcaaatgcgttccgcctgcttacccaccagtttgagggaaggcgacagggaggatttgtactcacctactccaccttggcaagcatcgtgaaatatcccttttcatcgagtcttgctggcaaaaagtcaaaattcggtttcttcatcacagaggaagaaagttttcgccgcatagcagaagagttgggtatggagaagcagaacgatgccccgttgaaatatgcccgccacccgctggtctatctggtggaagccgccgatgacatctgctaccagatgatggatattgaggatgctcacaaactgaaaattctgactacacaagaaaccaaagagttgcttctttcttatttctcgaaagagcgccaagcacaccggctcaaaacgatggagatagtaagtgacaccaatgagcaaatagcctatctgcgttccagcgttatcgggctgcttatcggcgaatgcgtgcaagcctttgtagacaatgaagaaaagattctgaaaggagaatttgaaggaagcctcatcaaccatatatccgaggtaccagccaatgcctacaagcactgtgcagacatctccctgaagaggatttaccgctcacgcgacgtactggacattgaacttgccggtttccgcatcatcagtaccctactcgaactgatgattgacgccgtgcgttctccagaaaaggcatattcgcaactgctcatcaatcgcgtatcgggccagtacaacataaaagcgcctgcactctatgaaagaatacaggcggtattggattacatctccggaatgacagatgtatttgcactcgatttatacaggaaaataaacgggaatagcttgccagcggtataacagacgacaagcattcttccggatagtcctatgatacaaccttatttgctcccgacgtaagcttgcatgcctccggtgcgctcgctatgaatgactcgatgtgacgaatgcgcttttctgccaaaatctcgtccacggcaatcaggatacccgtttcctccacatctccgaaaccgtaattgatggctgtaccaaacatacgcatggtagggctgagactcatataggcattcaccagagggggaatattataccccgccttacggatttcacaattcaaaatcttatagtcttctttaaaagagtctttacagaagagagctgccaattcactctcgtccgattccagaagtaacggcttcatcggagtaatcaggttgtccttatccgcaaagtgtttccgaagaaaataaagaatcttatcacgactctgacgatgatagctgggatacatagtcacctttccgaagaaatacttcacattgggcatgactacggtcagtgcgcccaaaccatcccacagattatccaacgcaaacagacctttactgtctgcacgcgtagactgatactccaacgtaacgaacgaacgtcccaactcaatggtcgtaggaagatagtccttcaaaaatttatccgaaaagttaaacatatgggcagttgccagaataggggcaccatgttcatcaaaacgcacatccgtacctaagatataacggtatccacccaaaatttcttcagcttccggattccagacaatcaactgcttgtacggattgtccatgatgtcatattcgtcaatatccatagacttgcccgttcctcctcccgcagcgcggaacgcaatctcgcgcaaacggccgatctccttcatggtattcggagagtcttgggcagtaatgatatatatctggttatgacttctattggtcatgcgcaggcgcttctcctcagtcaactccgctttcaacagctccttgcttatcggtgcaattacatcttccatatttctctgttagtagttcttcttttatataaatacggtctctctacaatttatatacaatatccttcacatattgcgcccatccagccgggcttttcgatttatcgaaagtttgccaggggataggcttccctatggtgatagtaaatgttttatggcgattcttcagcatttcatctgccaggtaaagcatggcgatattgaacttgacacccaatatcttacaaagattggcaagattataaaagaaattggagttccgcccttcgaagtggatgggaactacatcacggtgggcttcgacactcttcacgataaaggtctttttccaatccaagtcacggatgaccccattctgcctacgtgaacaaagacctgcgggaaacatgatgagctgattgtccgaagcaaatcccgcctccaccattctcgggaagtctttggcctgctttcccgtcttgttgatggggatgcagagcggtgccagtccgtgcaggttcatcagcaggtcgttgaccatatatttcaccttgccgccataaaaggagcccaagacataacccaacgccactccgtcctgcccacccaggggatggttggatacaaaagtataaagcccttctttaggcagattctcctccccctttaccacaatattggcatcaaggaactccagacaagctttcagaaaatccacaccgactttatctttcgactcccgcaaaaagacattcaattcctcttgatgaacgatatgcttcaaataagaaactacgaacttggggatatacttagacttcttcggagccttttcccgaagtatcttgtctatgtcaatcaaaaataaagagtcgtcagccattcttcttttgatgaaatgaatgtgcaaaattaactcatctttttaattaatcgcaaaaaaaggacagaaaactacacccgaaatctatcaaataacacctaaaaactatcaattgacagttttccccctaaagtgtgtttgaaatccgtctgcctgaaaaagaaaacttccgtaaacttgcaatatcatgattaacgaaaaaacatagcacatatgaacaatataacatttaaaaaagacctgctcggagttcaagacgatttattgcgttttgcatacaaacttacttccgaccgtgaagaagccaacgacctcctgcaggaaacatccctgaaagctctggataacgaagagaagtatactcccgataccaatttcaaaggatggatatataccatcatgcgtaatatcttcatcaacaattaccgcaaagtggtgcgtgaccagacttttgcggacaccacggataatctctatcacctgaacctgccgcatgacaccgcttttgagagcacagaaagagcatatgatttgaaagagatgcaccgcattgtcaacgccctgccacgggagtacaagattcccttctccatgcatgtctccggcttcaagtaccgcgaaattgcagagaagctggggttacccttaggcacggtaaagagccgcatttacttcacccgccaaagattacaacaagacttgaaggattttgtttaagaacccagcatataaaaccagtgatttccataaattaagaagagtacaaattttagttgtatcaaaagagagaaaggtaggccgggacaatcccatgtctacctttcatggcctcgcctttatatttctgcacgaacatattcaagccgttacgctttgcgataatattatttacaaaaatcaggtagtaacctctggttacattccacctttccagctatccgaagcactgaaagctaaccaaaaccacctgaaaactgccaattattagatttccccccaaagagagtttgatttccgtctatcaaaaaaaagaatcatccataactttgcatcatcaataaaacgaacaataattaaaaaaacatccattatgaataatagaacatttacccaagacctactcggagttcaaaacgacttattacgctttgcatataaattaacctccaaccgcgaagaagccaacgatctgcttcaagagacatcattaaaagctctggacaatgaagagaagtatacacctgataccaactttaaaggatggatatataccatcatgcgtaatattttcatcaacaattaccgtaaagtggtacgtgaccagacgtttgcagataccacagacaatctctatcatctgaatacaccgcatgacctcacactcgacagcacagaaagtgcttacgacctgaaggaaatgcaccgcattgtcaatgccctgccacgtgagtacaagatacctttctccatgcacatttccggtttcaagtaccgtgaaatcgcagaaaagctgaacctcccacttggaacagtaaagagccgtatcttttttacccgccagaagctgcagcatgacttgaaggatttcagataagagaatacggcaagcaaagaattgtttatttattggccggataaaaacgaaatatacttattttcagacaatcatagaatacaaaccaagatacctaaagaaaaaccgagtgattaataaacaacatgaagaaacagacaaccattacagcctgcacatttgtaacaatggcaatggaagctcctgctgtttttgtcgtacagccggccatgagcaagcacgtcaagtacgcaggtatggcactacgtacagctggtcaatgaagacaaacttgactcgctgaacagcatacagtaaaaaaaagatttatccaccggattctgtggatgaatataataatcaaccaccctagggaaatattatcactcctccccatcatctcccggcaaacggtaacgttcacaaaaaaagatggtaaattaacaaaaaagagttaagaagttaatactaaaacaaggaagagttaagaaagagctttatcccaaactttggtttttccaaaccaagccttgagatagaaaaaccaaggcttggtttagatatccgcaaggctgggaaagaagtttcccgcccaagacaccattccaccaacaagcgactttcaaaccaaagacccgccatctctaactgaatcttttcaaaagagactacacaaattccccaccagcaaagtgcttcaaaagtagcttcattatcaaatgaataagctatcaacaaggtgttgaaaacttcttcctaagattttagttaaaagattgtggggaattgtggagaaatgtgtatttttaccgtcgcttattataataaggtgagaaatgatacaattcttaggtaatatcgaggcgaaggcagatgcaaaaggaagagttttcatcccggccaccttccggaaacagctgcaggccgcttccgaagaaaagctcgtgttgcgcaaggacgtatatcaggattgcctggtgctctacccggaaagtgtatggtttgccacccaaaaccaacttcgctgccggctgaataaatggaacgctaaacagcaaatgattttccgccagttcgtaagtgacgcggaaatcatgatccctgacgggaacggacgcatcctgctcccaaagcgttacctgcaaatggtgggtatacaaagtgatgtccgcttcattggcgtggacaacacaatagaaatctgggccaaggaacgtgccgaacaaccattcatgaaccctgacgagttcagtgaggctcttgaagagctgctgggagacgaaaatatttgctgtgacgaaaataagctataaacaacagatgatgaaagaagaaacaacatatcatatccccgtattgctgatgccgagcgtagatgcgatgagcatccgtccggacggcacgtatgtagacgtaacgtttggtggaggaggacattcgcgcgagatactgtcccgcctggaagacggcggccggctgctgagcttcgaccaggacgaggatgcggaacgcaacattgtgaacaacccgcattttacattcgtacgcagcaacttccgctacctgcacaacttcctacgctatcacggcatcgaaaaagtggatgccatacttgccgacctcggcgtatcttcccatcactttgatgacagcgaacggggattttccttccgcttcgacggagcactggatatgcgtatgaacaaacgtgccggcctgacagctgccgacatcgtgaatacctacgaagaagaaaagctggccgatattttttatctgtacggcgagctgaagaacagccggaaactggcatctgtcattgttaaagcacgggctacgcagagaattgccaccatcggcgaatttttggaaatcgtcaagccactcttcggccgcgaacgtgagaagaaagaactagcaaaggtattccaggcattgcgcattgaggtaaaccaggaaatggaggcactgaaagaaatgctgtatgcagcaacagaagcgctaaagccgggaggccgtctggtggtgataacctatcactccctggaagaccgtatggtgaagaatatcatgaaaaccggcaacgtggaaggcaaggccgaaaaagatttcttcgggaacgtattgaccccgttccggctggtcaacaacaaagtaattgtaccggacgaggaagagatagagcgcaatccgcgttcgcgcagcgccaagctgagaattgcagaaagagtaacgaatgattagtgactagcaatggaaaagaaacaagaagaaaagaatacggagaaggtgaaaaaacgcacctcactgaaaaacatcataggaggcgacattctggccacagacttcttccgccgtcaagccggattgttgttccttatcatggtgcttatcattatttacatcaacaaccgttacgaatgccaactgcaactgatagagatagacaaccttaaaaaagagttgatagacatcaagtacgatgccttgacacgcagttcggaattaatggaacggagccgccaatcgcgcatcgaagaatacatcgccaccaaagaaagtgatttgcagacttccactaatccaccgtacttactaaaataatggagaattgaggattaaagtaatttcaatagcacatcgtaaatcgttaaatcgtaaataacattggctgtaaataaaaaaaacataatgacccgttacttcttcgtcgtcctactcatggggctggtggggatagctattgttgtgaaaggcgccatgattatgtttgccgagcgacagtactggcacgatgtagccgaccgcttcgtaaaagagaatgtaacggtgaagcccaaccggggaaatatcctgtcctcggatggtaaactgatggcaagttcgctgccggaatataaaatatatatggacttcatgtccggcgaaagggacgagaagcgccgcaaaaaggaccagcagcgcaaggattctatctggaaagccaatttcgattccatctgtatcgggcttcatcagatttttccggacatcagtgccgccaccttcaaaagccatctgcgcaaggggcgggagatgaagagccggaactacaacattcttcccaaccgcaaccggcgcatctcttacattcagtataaggaagccaagcggttacccgtattcaagatgaacaaataccgaggcggtttccacgaacagatatacaaccagcgtaaaaagccgttcggttctttggcagcccaaaccctgggccgtctttatgccgatacagccatgggagcccgcaacggcattgagttggccttcgacaccctgctgaaaggacggaacggtattacccaccgtcagaaggtgatgaacaaatacctgaatatcgtagaccttcccccggtagacggttgtgacatcatatccaccctcgacgtaggcatgcaggacatctgcgaaaaagccctggtggacaagttgaaggaaatcaatgccaatgtcggggtagccgtactgatggaagtggctaccggagaagtgaaggccattgtcaacatgatgaaagctggagacggcaattactacgaaatgaacagtaatgccatcagcgatatgttggaaccgggctccaccttcaagacagcctccattatggtggcactggaagacggcaagataaccccggataccgaggtagacacgggcaacggtattatgaatatgtacggcagcaagatgagagaccacaactggcaccggggaggctatggaaagatagatgtgacacgtattctggaagtttcttccaatgtgggcgtctcctacctcatcgacaagcactacaaggataatccgcagaagttcgtggacggtttgaagcgcatgagcatcgaccagccgcttcatctgcaaattcctggtgaagggaaacccaacatcaaagggcctaaagagcgttattttgccaaaacgactttgccgtggatgagtatcggctacgagacccaggtacctcctatgaacatactgaccttctacaatgccatagccaacaatggggtcatggtacgccccaagtttgtgaaagcagcggtaaaggatggtgaggtagtgaaagaatatcctacggaagtaatcaatcccaagatatgttccgaccataccctgacacagatccgcgaaatccttcggaaagtggtatcgcaaggtctggcaaaacccgccggcagcaagcagttctccgtatcgggcaagacgggtacggcacagatttctcaaggagccgccggatataagtcgggacgggtgaactaccttgtaagtttctgcggatatttcccctcggaagcacctaaatacagttgcatcgtttccattcagaagcctgggttaccagcttcaggcggtctgatggcaggtagtgtctttgggaaaatagcggaaagagtttatgccaaagacctgcgttttgacatacgcagtgccatagacagtaccaccaatgtgattcctcccgtgaaagccggagagatgaacgaggcgctccttgtattgaacgatctgaaagttcccgtccagaaacagttctccgaacaaaagaaaaaggagcagtggggacatacacaagctgccccgtcggcagtcatcctgcaagaccaggaactggcctcgggcaccgtgcccagcgtggtcggtatgggagcgaaagatgcagtctaccttttagagagcaaaggactgaaagtaaggctaaacggcgtaggacgggtgaggaaccagtccatagcaagcggcagtcggatagtgaaaggacaaaccatagccctgacactacgttaacatgagaataaacaagatttggatatacattatataataaggtatgaaattaagtgatttgttggcaacaatacagccggtccggattgccggaagtacaaacatggagataacgggagtgaatatagactcccgcctgatagaaaccggacatctgttcatggccatgcgtggtacgcagaccgacgggcatgcctatatcccagctgctatcgacaaaggggctgtcgcagtattgtgtgaagaattgccggaagagctcaagaccggcaccacctacattctggtgaaagacagtgaagatgccgtagggaaagtggccaccactttctatggtgaccctacatccaagatggaactcatcggcgtgaccggaaccaacggaaaaacaaccgttgctaccttattatataatactttccgctacttcggctacaaggtcggactggtttccactgtatgtaattacatcgacgaccagcccgtaccgaccgaacataccaccccggacccaataaccttgaaccgcctacttggagagatggcggactccggctgcaagtatgccttcatggaagtcagttcccattccattgcccagaagcgcatcagcggtctgaagtttgccggcggtattttcactaatctgacccgcgaccatctggattatcataaaacggtggagaactatctcaaggccaagaaaaagttcttcgacgaactgccgaaaggagctttcagcctgaccaacctggatgacaagaacggactcgtgatgacacagaatacccgttcgaaagtatacacctactctttgcgcagtcttagcgacttcaaaggcaaagtcttggaatctcatttcgagggaatgttacttgacttcaacaaccacgagctggcagtacgtttcatcggaaaattcaatgcctacaacctgctggcggtattcggtactgccgtattgctgggcaagaaagaagaagatgtactggttgccctcagtacgctgcgtccggtaaccggccgcttcgatgccatccgttcaccgaaaggctacactgccattgtggactatgcgcatactccagacgccctggtcaatgtattgaacgccattcacggagtgctggaaggaaaaggaaaagtgattaccgttgtaggtgccggcggcaaccgcgacaaaggcaagcgtcccatcatggccaaagaatccgcccgcttgagcgaccgggtcatcattacctccgataacccgcgctttgaagagccgcaggacatcatcaacgacatgctggcggggctggataaagacgacatgcagaaaaccatcagcatcaccgaccgccgcgaagccatcaagacagcctgcatgctggcacagccgggagacgtgattctcgttgcaggcaaagggcatgagaattatcaggagattaaaggcgtgaaacaccattttgacgacaaagagatattaaatgaaataattaaataattaacattatgttatactacttatttcaatggttagacaaatatgacttccccggtgcgggcatgttcggctatacatccttccgttcgttgatggcaatcattctggcattgctcatttcgagcatctggggagacaagttcatcaatctactgaagcgcaagcaaattaccgaaacgcaacgtgatgccagtatcgatccattcggtgtgaacaaagtgggagtacccagcatgggcggtgtcatcattatttttgccacactcattccttgcttgctactgggcaagttagacaatatttatatgatattgatgctgattaccacaatctggttagggtcgctaggatttgccgacgactacatcaagatattcaaaaaggacaaggaaggcctgcacggtaagttcaaaatcatcggtcaagtaggtttaggacttatcgtcggattgactctctacctcagcccgcaggtggttatccgcgagaacatagaaatagagaagccagggggacaaatagaagtagtacatgcagccaaggaaatcaaggcaacgcagaccaccatcccgttcttcaaaagcaacaacttcgactattccgacttagtaagctttatgggtgaacatgcccaaacagcaggttggatattgttcgtgattatcactattttcgtagttaccgccgtcagcaacggagccaacctgaatgacggaatggacggaatggcggcagggaactccgccattatcggactgaccttgggaatactcgcctacgtgtcgagccacattgaatatgccggctacctgaatatcatgtacattcccggctcggaagaactggtaatctttatctgtgccttcatcggtgcacttatcggcttcttatggtacaatgcctatccggcccaagtattcatgggcgatacgggcagtctgaccattggaggaatcatcgcagtatacgccatcattattcacaaggaactgctgatacccatcctttgcggtatcttcctggtggagaacctctcggtcatcctgcaacgcctctactacaagacaggcaagcggaaaggcgtgaaacaacgtctcttcaaaagaacgccgatacacgaccacttccgcacttccatgagcctgatagaaccgggatgcagcgtggtattcaccaaaccggacaagctgttccacgaatccaaaatcaccatccgcttctggattgtgacgattgtactggcagcgataacaattataacattaaagattagataatgtgggatgcattagcatagtttccacattgacatattagtatataaatattatgagtagaattgtagtattaggagctggcgaaagcggcgcaggcgctgctgtactggccaaagtgaaaggtttcgacacgttcgtctccgacatgtctgctattaaagacaaatacaaggaactgctggataaatacggcattgcctgggaagagggacaccacacagaagagctgattctgaatgctgacgaagtggtgaaaagccccggtatccccaacgacgctccgctcattgtgaaattaaaggaaaaaggtacgcccatcatctctgagatagagtttgcgggacggtacactgacgcaaagatggtctgtatcaccggctcaaatggaaagactacaaccacctcgctcatttatcacatcttcaagagtgcaggactgaacgtcggcctcgccggcaacatcggcaacagcctggccttgcaggtagccacggagcagcatgattactacgtcattgagctgagttccttccaactggacaatatgtataacttccgtgccaacattgccgtactgatgaacatcactccggaccacttggaccgttacgaccactgtatgcagaaatatgtggacgccaaattccgcatcacccaaaaccagacaccggaagacgcttttatcttctggaacgacgaccccatcatcaagcgcgaactggacaagcatggcctgcgcgcccatctttacccgttcgctgccgtaaaggaagacggagccatcgcatacgtggaagacggtgaagtggaaatcaacgaaccgatagccttcaatatggagcaagaggagctggcgctgcacggcacacacaacttatacaattcattagccgctggtatctcggccaacttggccggtatccgaaaagaatatatccgcaaggctttgtccgacttcaagggagtggagcaccgattggagaaagtagccaccgtacgcggcgtaagcttcatcaatgattccaaggcaacgaacgtaaactcctgctggtatgccctgcaaagcatgaccggcaaaaccgtacttatcctcggcggtaaggacaaaggaaatgattatacggaaatcgaagaccttgtacgcgaaaagtgctctgccctggtatatttgggattacacaacgaaaagctgcacgacttcttcgaccgcttaggattgcccgtagctgatgttcagaccggcatgaagaatgccgtagaagcagccttcaaactggcaaagaaaggtgaaaccgtgttgctcagcccttgctgtgcctccttcgacctcttcaagagttatgaagaccgcggcgaacagttcaaagcatgtgtcagagcactataaaagacaagtgccgcatgagactgtcaacttgtaattctttaattattaatttttaatttgcgaagcattggatttattaaagagcatattcaaaggcgacaaagtgatttggattattttccttttcctttgcctcatctccatcacagaggtattcagtgctgccagtacgctgacctacaagagtggcgaccactggggaccgattacgcagcacagcattctcctgatggtaggtgccgtcattgtagtactggtacacaacatcccctataaatggttccaggtgttcccggtattcttgcttccgatatccatcggactgctggcttttgtgatgctgatgggattcattaccggtgaccgcgtaaacggcgcagcccgctggatgaccttcatgggcattcagttccagccgtcggaaatagcgaagatggccgtcgtcatcgttacagcctttatcctctcgaaagggcaggacgaagacggtgcaagtccgaaagcctttaagcgcatcatgattattacctgcatagtctgtggccttatcctgccggaaaactactcaacgggaatgttgctcttcggaacggtctacctaatgatgttcatcgggcgggtatctgccaggaacctactgatactgggaggagggattgtggcattcgttacagtctttgttgccttcctgctggccacgccagacaagacattggaaaatataccgatgggacaccgttttaccactgtaaaatcccgtattgcagactttaccaacaaggaagaagttcctgctgccaaattcgacatcgacggcgacgggcaagtggcacatgcccgtattgccgtagctacgagtaacgttgtaggcaagggcccgggaaactccgtacaacgtgactttctgagccaggcattctccgattttatctatgccatcatcattgaggaactgggactggtaggcgggatagtcgttgtgttcctttatgtctgcctattggtgcgagtgggccgtatcgccaaaaaatgcgaccgcaccttccccgctttcctcattaccggaatagccttgctactcgtcacgcaggcgttgttcaacatgatggttgccgtaggtctggcacccgtcacgggacaaccgcttccgctcatcagcaagggtggtacatccactttcatcaactgtgcctacatcggcatgatactgagcgtcagccgctatacagccaaactggaggaacaacggatgcatgatgcacaagtgactatgctggtggataccggaaatgcagaaaacctgaaacaaccgatcgacagcgaggcacaaacagccgccgaaccgacagcaaaggtactgaacagtgatgcggagtttgaataacagcctctcccccaccccctcccctatagggaggggagaaaagagtgattgagtaatggcgagtatgccaataatacaaaaataaagaagaacaagaatatgagtaaagaggcaaacaactatacaagtcaaagtaactctacccctctctctacggggaagggagtgaggcttatcatcagcggcggtggtaccggaggacatatctttccggctatctccattgccaacgccataaaagagttgtgtcccgacgcagagattctcttcgtaggtgccgaaggaagaatggagatgcagcgtgttcccgatgctggttaccggattataggtttacccgttgccggatttgaccgtaaacatctgtggaagaacgtctccgtattgctgaaactgatacggagccagtggaaagcacggagcatcatcaaggagttccgcccgcaagtagctgtcggtgtaggtggctatgccagtggtcctacgctgaaaatggcgggaatgatgggtattcccacactgatacaagaacagaattcctacgccggtgtcactaacaagctgctggcacagaaggcatgcaagatttgtgtggcttacgaaggtatggaaaaattcttcccggcagaaaagataatcatgaccggtaatccggtgcgccagaatctgctccaccactccatctgccgcgaagatgccgtgaaatacttcggactgaacccggagaagaaaacaatactgatattgggcggcagtctcggagcccgcaccatcaatcagacattgagtgccggactggatgtcattcgcgccaatcccgaagtgcaattcatctggcaaacggggaagatatacattgaccaagtcagagaagctattacaaatacaacgggagaagccgtacgcaacccgcgcattagtgccatccccaatctgtacgtgacggacttcattaaggatatggcaaatgcatacgcggctgccgacctggtgatttcacgtgcaggagccggttccatctccgagttctgcctgctgcacaagccagtcatcctggttccctcacccaatgtggcagaggaccaccaaaccaagaatgcgctggcgctggtggataagggtgcagctatctatgtgaaggatgtggaagcgaaagagaagctgctaccggtggcgttggagacaatcgccaactccgagaagctgcaagacttaagcaagaatatctccaagctggcgttgccggactcggcaacaattattgcgaaggaggtattgaagttaattaagaaataaattaggagagcatcttaatgaaagatatgaatatagaaacaattaaatccgtttacttcattggtgccggcggtatcggcatgagtgcgctgatacgttatttcctctctaaaggaaagaaagtagcgggctacgaccgtacgtcgagcgaactgacagaacgcctgattacggaaggagtacagatacactacgaagagaatatcaaccttattccggaggtgtgcaaagacaaggcaagcacgctcgtggtctatacccccgccgtgccgcaagagcatgcagaactgacctatttccgtgaaaacggtttcgacatatataagcgctcccaagtattgggcatcatcacccgcagcagcaaaggtttgtgcgtggcaggtacgcatggcaagactaccaccagcaccatggctgcccacctgctgcaccagtcacacgtgggctgcaccgccttcctcggaggtatttcgaagaactacggtacgaatctgctgctttccgccaccagtccttataccgttatcgaagcagatgagttcgaccgttccttccactggctgtcaccctggatgagtgtcattactgccaccgaccccgaccacctggatatatacggcaccaaagaagcctatctcgaaagcttccgccactacaccgcgcttatacaaccaggcggcgccctgattctgcacaaaggactggagatgcagcccgacgtacagccaggggtagccacctatacctactcgcgccatgaaggtgacttccatgccgagaacatccgtatcggaaacggtgaaattttcatcgatttcgtagcaccggacacccgcatcaatgatatccagctaggtgttcccgtcagcatcaacatcgagaacggcgttgccgccatggcactcgcccatctcagcggtgccaccgacgaggaaatcaagcaaggcatggcaagcttccgcggagtggaccgccgtttcgacttcaagctgaagaatgaccgaattgtattcctcagcgattacgcccaccatccggcggaaatagcccaaagtctgaagtccgtccgtgaactgtaccaagacaagaaggtaaccgtcatcttccagcctcacttgtacacccgtacccgcgacttctaccaggattttgcaaacagcctttccctatccgatgaggtgattctgacagagatataccctgcccgcgagcaaccaattcccggcgtgacgagtcagctgatttatgacaacctccgccccggcatcgagaaatgtatctgtaggaaagaagacgtcctcagcctcctcgcccagaagcataccgaagtagtggtagtgctgggagccggcgacctggacaactatgctccccaaatcacccaactattatcagagaagtatcatggttaaaaggattctactttctatcgtcctgttgcttgtcattgtctatctggtggtggctgtcactgccctcaaccgcaaaccggccacccaggtgtgccatgacgtggagctggtgataaaagacacggtatatgccggcttcatcacgaagaaggaagtagctaccctgctggagaagaaaggcatcagccccattgggaaagacctgaaacgcgtgcgcaccaagaccttggagcgcgaacttgccaagcatcccctcatcgaccaggtggagtgctacaagaccccgagcggcaagctctgcatcgaagtgacccagcgaatccccatcctgcgcgtgatgagcgccaatggcgaaaactactatctggacaacaagggtactgtaatgccccccgatgcaaaatgcgttgcacaccttgccgtagtgaccggaaatgtagaaaagtcgtttgccatgagggatttatataagtttggtgtatttttgcagaagaattctttttggaatgcacagattgaacagattcatgtactgcctggcaaaaatatagaattagtgccacgtgtcggcgaccatctcatctatttgggtaagatggccggttttgaaaagaaactgaaacgtgtaaaagcattctacgaaagaggtttgaaccaggtgggctggaacaaatactcccgcattaacgttgaattcgataatcagattatctgcacgaagagggagtaaagagatttatcccttatcaaagcgcagtaaattgtaaattgtaaaatagtaaataaatagatatggcaacaacagatttcatcgccgctatcgagttgagttcttccaagatttccggtatcgcagggaagaagaacagtgacggaagtatccaggtgttggcttatgcatgcgaagatgcatcctcgtttatacacaaaggggccatctacaacattgacaagaccgcacaagcgctgacttccatcatcaacaagctagaaggccagctgaacaactccatcgccaaagtatatgtaggcatcggcggacaatcattgcgcacggtgaggaatgcggtaagccgtacgctggaggaagagagcatcatttcgcaagaactggtagacgagatttgcgacgagaaccgtgatgtacccctagtagacatgagtgtgctggatgtagccccacaagaatacaagatagacaacacgttgcacgtggagcccgtaggagttgccggaaaatacatcaccggacagttcctcaacatcgtggcgcgcgcctcgctgaaaaagaacctcgaacacagcttcgagcaagccaaagtggaaattgccgacgacctgctcgtagcccccactgcgttggccaaagccgtgctgactgaaaacgagatgcgttcgggctgcgcactggtggacttcggtgccgacaccaccaccgtgctggtctataagaacaatatcctgcgctacctcagcgtactgccgctgggtggaaacaacattacccacgacatcacttccctgcaaatggaagaggaagatgccgagaagctgaaactgcaatacggtgatgccctctacgaggaggaagaagacgccgagacccctgccgtatgcacgtcggaagacggccgtaccttcgaactggccctgctgaacaatattatcggagcccgtgcagaagaaatccttgccaacgtatggaaccagttacagctttccggctacgaggacaaacttttctccggtgtagtatttaccggtggaggagccaatctgaagaatcttgagaaagccttccatagagtgagcaagattgaaaaggtaaagaccgccaagttcgtacagaccaccgtccacacacgcagcgaagagcccaaaaaggacggcatgcacaacacactgctgggcctgctggctgccggcaacgagaattgctgcctgcaagaggtgaaaccggtgcagcagcctgcctccaatgttcctcccaaaccggtcgacatattcgttgacgacgaagcgctgaaagagcaggaagctgccgcacgcgccgccaaggcacagcgcgagagggaagagaaagaacgcaaggagcgtgagcgaaaagaaagggagctgcgcgaaaaggaagagaaaaagaagaaaaagaaagaaggccccagctggttcgaaaagactttcaacaagatttccaacgaaatcttctcggacgacgatatgaagtaataatgtgataatgtgccagaaaattaagttattatggaagatatagtacaattcgatttcccgacggattcaccgaaaatcattaaagtaatcggtgtaggcggaggtggcggcaatgccgtgaaccatatgtaccgggaaggtatacacgacgtgacgttcgtactgtgtaacacagacaaccaagcgttgaaggactctcccgtgcccgtgaagttacagcttggaaaagaaggcctgggagccggaaaccgccccgcccgtgcccgcaaggcagcagaagagagtatcgaagacatcaagaatatgctgaacgacggcaccaagatggtattcatcactgccggaatgggcggtggtaccggtacgggtgccgcacccatcattgcacagaccgccaaggaaatggatatcctgaccatcggcatcgtcaccatccctttccgctgggagggcgacaagaagatagaccaggcactggatggcgtagaggaaatcagcaagcacgtagatgccctgctggtcatcaacaatgaaaagctgagcgagatatacagcgagttgtccgtggacgacgcgttcgacaaggccgacgacaccctttcggtagccgccaagagtattgccgaaatcatcaccctgcatggaaaggtgaacctcgacttcaacgacgtgaaaacagtgctgaaggacggcggcgtagccatcatgagtaccggctacggcgaaggtgacaaccgtgtcagcgaagccatcaagaatgcgcagcactcgccgttgctgaacaacaacgacattttcaattccaagaaggtactcctcaacatctcttacagctcacaatacaagctgatgatgagcgaaatggacgaggtaaaggaattcatgaaccgtttcagccgcgacttcgagaccaaattcggtatggccatcgacgacaaactggaacagaaagtgaaaatcaccctgcttgccaccggtttcggtatccaggacatccacatgaaggagatggacgaccgcatcacccagcgcaccgccgaagaacagcaacgccttgccgagctggaggaggaagaggaacagagacgcaaccgccgcgaagtgtactacggcaaggatgccaacgcccgttcccagcgcagccgccgtcgccatatctatctcttcaatcccgaagacatggacaacgccgacatcatcagcatggtagagaattctccgacctatctgcgtgacaaaagcacgctgaacagcatcaagatgaaggcagagcaggaagggcagctcgccaccgaagccgcgcaagaagcagaaggcggtgcagggggagtcatcaccttctgatttttccgttcccgatatgtaaaaccatcctcctccccttcaggagaacaggagtaaacctataacaatatggatttatttgaaaaagtcagcgaagacattaaaacagccatgaaagccaaagacaaagtggctctcgaaacattgagaaacgtaaagaaagtattccttgaagccaaaaccgctcccggagccaacgataccctgagcgatgcagatgctttgaagattatccaaaaactgaccaagcaaggcaaagacgccgctgaaatctatgtacagcaaggtcgccaggacttggcagacgatgagctggcacaagtaaaggtgcttgaaacctatctgcccaagcaaatgagcgccgaagaactggaagcagccttgaaggaaatcatagccgaggtcggtgccaccagcggcaaggacatgggcaaagtgatgggtgtagccagcaagaaacttgccggacttgccgaaggccgcgccatctcagccaaagtaaaggaactgctgggataaagtatagcgaaggagataaggaatattcggattcaattgcatgagatgggcatctcgtgttgtatgagatatacatctcatgcagcataagatgcccatctcgcgcaatcaggagctattgtttcatccgacaagcaagattggcgctcctcaatcaaacaattctttcaagacttcaagagacttcagcaccgggaaatccggcaggtgcagacgataatattcattcataatgttcaggcagcgggtacgctccaaccgactcatggtgaaaagatgcatcgtttcataattcatgcgcatcagctgtgtcaggcgggccgcctcctcgggagcgatgtaattggaatgaagctgcggacgcaagggagtgaaacaagcattctgcaaatcgaagtaatctccggcatgataatcctccaggttgggatacaaaccgagaaaacgggaaaggcgcatcaggaagaccagatggaaattggcaaacccctccctgcattcatccagccagatgacggaatgatacagataagcaaacagcggacggttctccgcctcctcccggacggcgcgataaaggaattccgaaagaaacaaagcgatggcggatttgtagggatcgtagggaagcgtggcaaaaggataaagagacttcgcctccttcaccttatatatagtggcattaggacggaaatcggcttcaagttccaccaatgccagcggctggaagagtaccggcttcaccgccgccttgcgcgaacggggtatggacaccatgaaggaagccctgccagccacctctgtatagatgtctgcaatgagagatgtatccttatatttcaaggtatgcagtacaattccctgtgttttctgtaacattcccgatttctttatctggtttcaatctgataacaaagctacaaaaaaagcccgaaagaagagaaacaaaaggagaagaataaaaaaacaaggtaaggagtgtaaaaaaataaaagcatatattacactgattttcaatagataacgctccattctaagacaaaagacaacaaaaagctatatttttttcttgcgaatgttttggtaattcaaaaatagtttctacctttgcatccgcaaacgagaaataaagactctttgcaagagcggaaacgctcaccaaaggatggcccgttcgtctatcggttaggacgcaagattttcattcttgaaaggggggttcgattcccccacgggctacaaaataaaaaaataaacgaattaaaaaaagattagtcgagatggcaaatcataaatcatcactgaagagaatcagacaagaagaaacaagaagacttcacaacagatattatggcaagaccatgagaaacgctgttcgtaagcttcgtgctactacagacaaagctgcagcaacagcaatgtatccgggtatcacaaaactgttggataaattggctaagactaatgtaatccacaagaacaaggctaacaacttgaaatcaaagttggctatctatatcaacaagctggcttaagttgactgttacacaaaagatattacaaggctggacttttttagtccggcctttctcatttatacctctctatttacctgcttccacacaagtttcttttctgtgctaaaaagctgtaaactacccgaatttatccgtttgtttagcaccatatcccgaggattttcactatatttgctctgttattacaataaggaaaaaagattatgactgaagaacagattcactccaataacgggagctattctgccgaaaacatccaggtactggaaggtttggaagcagtgagaaagcgtcccgcgatgtatattggcgacattagcagcaaaggacttcaccatctggtgtacgaggttgtggacaactccatcgatgaggcacttgccggctattgcgaccacatcgaagtcaccattaacgaggacaactccatcaccgtacaagacaacggacgtggtatcccggtagactatcacgaaaaggaaaagaaatccgcgctggaagttgtaatgaccgtactgcatgccggaggaaagttcgacaaaggttcctataaggtatcgggaggtctgcatggtgtaggtgtatcttgcgtaaatgccttgtctacacacatgactacccaggttttccgtaacggaaaaatctatcagcaggaatattcctgcggacatccgctctactccgtcaaagaagtgggcacaacagacattaccggtacacgccaacagttctggccggacggtaccatctttacggagacagtctacaactatgatattcttgccacccgcatgcgcgagctggcgtatctgaacgcaggcatcaagatttcactgaccgaccttcgcgtaaaggacgaagaaggaaatgccaagaaggaaatcttctactcggaagaaggcctgaaggaatttgtgcgctacgtggactcctcacgcgaacacttcatgaacgatgtaatctacatcaacaccgagaagcaaggcacaccggtggaagtagccatcatgtacaacacttcttataacgaaaatgtacactcttacgtaaacaacatcaataccattgaagggggtacccacttggcaggtttccgccgtgcactgacccgtacgttgaaaaaatacgccgaagacaacaagatgctggagaaagccaaggtagagattgcaggcgacgacttccgcgaaggactgactgccgttatctccatcaaggtggcagagcctcagttcgaaggacagaccaagacaaagctgggtaacaacgaagtgatgggcgccgtagaccaggctgtgggcgaggccctcacctactacttggaggaacacccgaaggaagccaagctgattgtagacaaggtgattcttgccgcccaggcacgtatcgccgcacgtaaggcacgcgaatccgtacaacgcaaatcgccgatgtcgggtggcggcatgccgggcaaactggccgactgctccagcaaggacccggaagaatgcgaattgttcctcgtcgagggtgactcggcaggcggttcagcaaagcaaggccgtaaccgtgcgttccaagctatcctgccgcttcgcggtaagattctgaatgtggaaaaggccatgtggcacaaggcattcgagagcgacgaagtaaacaatatcatccaggcgctgggcatccgtttcggcgtggacggtgaagacagcaaagaagcgaacattgacaagctgcgctacaagaagattatcatcatgaccgatgccgacgtcgatggttctcacatcgacacgctgattatgacgcttttcttccgctacttcccgcaagttatccagcagggttgcttgtacatcgccactcctcccctttacctttgcaccaaaggcaaggcgaaagagtattgctggacagaccagcagcgccagaagttcatcgacacttacggcggcggttcggaaaacgcagtacacacccaacgctacaaaggtttgggtgaaatgaacccggaacagttgtgggaaaccaccatgaatccggaaaaccgcatgctgaagcaggtgcatcttgaaaatgcagctgaagccgactatatcttctccatgctgatgggtgaagacgtgggcccgcgccgcgatttcatcgaaaagaatgcaacgtatgcaaatattgacgcttaattaatttaataaccaacctcacatcttacaacgaggaagccccggacgggcaggataatcctgctgaccggggcttttcctttatccctcttctcttccaaagaagagacccgtctccatacagaagaactataggattccttgtttcttcatctcttccactaccaattccaactctgcataccagtcctcaccaaacttacggataagcggctctttcaggaacttgtacacgggcagattttccttttgtcccaacaacatagcggctttgcagacatcccaacgatgatagttcactgccttatagagtccgtagttccccacccttatcggatagagatgacaggatatgggtttgtagaagttggtcctaccttcacgataagccttttcgatggcgcaatagcaacagcctttatcatcatagcaggtaaagacgcaatccttgttgttcacaatagaagtcaccaggtcaccttcacaatcggtatagaccacaccttgctcctctatcacggtgcgggcttcgggagaaagctcgtcccaaatcagcggaagcacctcttccagtttctccacctcgtccagctctacgggagcaccggcatcgccctcaatgcaacaaatcccctgacaggcacccaagtcacacaagaacttctcgcgcaagacatcgaaagaaaccacaacatcaccaatctgtatcataatcattctattaaaaaaagacgcggattatccggattgcacagactcaactttaagagcatccgtggaatccgtataatccgcgtctaaatattgttacggccttgacgccttacttaatcaaatccttaccagtcatttcggccggctgttccatacccaagatatgcaggatagaaggagctacgtcagccaatacaccgttctcaaccttggcgtccttgtttgcagtaacgtaaacgaaaggaacgggattcagagagtgggcagtattcggagtaccatcctcattcagagcatggtcggcattaccgtggtcggcgatgatgattacttcataatcgtttgccttggcagcttcaacagtatctttcacacattcgtcgatggctttcactgccttctcaatagcttcgtagataccggtatgtcccaccatatcaccattggcgtagttcaccacgatgaaatcgaacttctgggtcttgatagcttcaaccagcttgtccttcacctcgtacgcactcatttcgggcttcaagtcgtaagtggcaaccttcggagaaggaaccaagatgcgctcttcagcatcgtagggagtctcgcggccaccgttgaagaagaaagtcacgtgtgcatacttctctgtttcggcaatgtgcagctgggtcttgccattggcagcgaggtattcgcccaaggtattctgtacgttctccttatcaaaaaggatatgcacacccttgaagctggcatcgtacggagtcatgcagtagaactgcaggcccggaatggtctgcatgccttgttcgggcatatcttgctgggtgaggacaacggtcaattccttggcacggtcattgcggtagttgaagaagattacaacatcaccttccttgatggtaccgtcgaagccaccgttcacaatcggcttgatgaattcatccgtaacgccttcgtcgtaggactcctgcatagcctggaccatatccgtagcaaccttgccttcaccgtttaccaataaatcgtaagcaaccttcacacgttcccaacgtttgtcgcggtccatggcatagaaacgtcccacgatggaagcaatcttgccggcagacttctcgcaatgagcagtcaactgctcaatgaaacctttaccactcttcgggtcggtatcacgaccgtccataaaacagtggatgaaggtattctcgataccgtattccttggaaatatcgcagagtttgaacaaatggtcaaaagagctgtgcacgccaccgttgctggtcagtcccataaagtggatattcttgccgttttcctttgcatatgagaaagcagaaacaatttccttgttcttcagaatgctgccatcggcacaagcacggttaatcttcaccaaatcctggtaaacgatacgtccggcaccgatattgaggtgacctacttcagaattacccatctgtccgtcgggcaaaccaacgttttcaccgcttgcttgaagctcggaatgcggataagttgccaacagactgtcccaatacggagtaggtgtattgaaaatcacatcatctttgccttgatcgccgatgccccagccatcaagaatcattaaaagggctttcttactcataatattaatcgaatttaattgtataatctttttgtatgatacaaacgttctttatagtaggaacctgtttttgcgctgcaaaggtacaaaaaacagctgttaaagcgtactgtttcaaatgatttatgtacttttgccacgcttaaaaaataaaaaacaagaaatatggacgattcaaacccacgaacgtgcaatagtattcaccaataaaacgaacggagacgttgactgcaatgcctctgttccaacctgaaaggaggcaaacaatgagaaagtatctctacagtgaaaacggcttcactgaaaaggccgaatggcaacccaactgctgggtcaacgtagaatgcccggacaacgatgatttcaaattcctaaccgaagagctgaaagttcccgaatcattcctggaagacatagccgacgtggacgagcgcccacgtacggaaacagaagacaactggctgctgaccatcctccgcatcccgatgcagagcaaccaacgcggcgtgccgttcatcactgtgcccatcggcattatcaccaatgacggaatcatcgtttctgtctgctatcaccacacggagctgataccggacttcattcagcacacccgccggaagaacatagtcgtcaacaataaactggatttgattctgcgaatcatctactcttccgccgtctggttcctgaagtatctgaaacagataaacaacgatgtggccaccgccgaaaaagagctggagaaaagcatccgcaacgaagatctcctgcaactgatgaagctgcaaaagacgctggtctacttcaacacttccatccgtggcaatgaagtgatgataggacggctgaaaaacatctttcaagacaccaattatctggatttggaattattggaagacgtggtcatcgagttgaagcaggcatacaataccgtaaacatctacagtgatatcctgacgggaaccatggatgccttcgcctccatcatctccaacaatgtgaatgccatcatgaaacgtatgacaagcctcagcattacactgatgattcccacgttgatagccagtttctacggcatgaatgtggacatccacctggagagttttccgcacgcgtttattttcatcatacttttgtcggcaatattatcagcagtgacattcgtatggttcagaaggattaagtggttctaaacagcatcattgtccgaagttcagcgacaactgcccatcccccaagagattgaacgtcaagcgatgatagggtgtagtgccccgctcagcaatggcggcacgatgtttcttggtgggataccccttgttacgattccagtcataatacggatattcctcgtgaaggcggttcatgtagtcatcacgataggtctttgccaaaatggaggcggcagcgatggaaaggtacttcccgtctcctttcactacggtagtatgcggcaagtcccgatattttttaaagcggttgccgtctatcagcagatgttgcggacggacattcagttggtcaacagcacggtgcatggcaagaaaggaggcattaagaatattgattttgtcaatttcttcgggagagacgacgcccaccgcccatgccagagcctctttctcaatcacttcacgcaaggcatagcgttgtttttccgtcagctgcttggagtcattcagaagttcattcttaaagtccgttggcagaataacggcagcggcatagaccgcaccggccagacagccgcgaccggcctcatcgcatcccgcctctatcaagtctttattcaaataaggtaataacatatatatcgctatctttgaggcacaaagataaatctttttggagggaaacctgacttctaagaagaattaattaaatttgcagaaacaagacgatgccatgaagaaaaacctatgtctactactcgtatgtcttctgtcagcacttgccccactgcaagctcaagacatgcagcaagcacagaaattgattgaccaagcacagaaatgcctatacaacacccccaaacaagcttcctactatgctgctcaggcttctgccttgtttcccgaagatgagcccagtgaggtccgtgcgcaggccatgttcctttattgccaggcagaacagctattgggcaactttgacctgagtatcaagaatctatatgatactcagaaatacatcacccccgcaaacaagcaacaaagtgcccaactatactccctcatgggacgtgtctacagcaaactgggagactacaacaaagccatagaactaaacgacaaggcaacctccatattcaaagccattggtgattccacttctgtggccggatgctataacgaacgtggagttatgcaccacttcatgaacgaatttaccgttgccgagcgtttcttccaacgtgcgctggccatcaaccgtgcccaacgaaacctgaaagagattgcaaccaacctgaacaacctttgtctgtaccagggaaatacggaagagaaactttctttcatccaggaagccatcaccatcaacaagaatctggacgcccaatggtctcttggcgaaaactacaacaacatggggaaacagtattactatgacaagcaatactccaaagccctggaagccttgcataaagcctacgagtatgcccataatatcggagcccgcgaactgatttgcgacaattacgaatattcgtccatggtatatgcagctataggtgactatgcccaagcctataaatacctggagaaaatgcagcacctgagcaaagagctgcaaagcagcaacaagctgcgtaacatcgagcaggaaatttcctataaaagataccaggaccagaagcatgccactgaaatgcaggaacaaacctatgaaatagaattgctgaaacgcaatctatggctcttgggcagcatacttattctcggtttagctgtcagtatcttcctatataaatggtataaacgcagaaaagacctgcaactgattgaaacccgctatcagttggaactctccgaacgcgaagtatccgaactgaaactacaacagcaagaaatggaactgaaaaacgtgcagagtgctttggatgacagccgccaggaggtcaccagctttgccgtattcctaagaagccgcaatgagctactcgacaagatacgtgggatgattaaagagggttataagatggataaccaaacactcattccccacctaaaaaaagtgaatgccttcatcagccaatatcaaagcggagataagacaaacagcagcttattgctgaatatagaagaaaagaacaaagaatttctggaccgacttgcattaaaacaccctaatctgacgcaaggcgaaaaatacttggcaactctattgcgcgtcaatctgtcaaccaaagaaatctccatgataaccggcaccattcccaaaacaatcaatatgaaccggtatcgtttacgcaaatccttgaacttatccacagaagaagacttggttgaatacctccagagcttctaaaaacgaagccgaagagaaaagctctcttgtagatatattatattacaataaaatattattattcaacgttttatcaatcatcttgtagattaaataatagtgctttcagcctcctttgtagatattttatagataaaggtcatagtcaaccttataattatatcacttcctttgcccttgtgaaaaacaaagtattaaccttaaaaaactttatcacacatgggtaaaattaaacagtatttgcaaagagcattactacttgctttgctctttgtatgtctagcgccgctaagtgcattagcgcaaaccatccagctaaccggtaccgtaaccgataccaaaggagaatctcttatcggtgccagtatcttggagaaaggaaccggcaatggttgcatcaccgacgttgacggcaactttacgttgacagtctctcctaaagcaactatggtaatctcttatgtgggttatgtaacccaggaaattcccctcaacgggcagaagaacatcaaaatagcattgaaagatgattctgaaatgctggatgaagtcgtagtcgtaggttacggtacgatgaagaagagcgacatgaccggtgccatttcttcggtgaaagcggaagatttgatgaagcgtgccactaccagcgcaaccgaagcactgcaaggtaaaattgccggtgtaagcgtattgaaatcgggaggtaatgcaggtgcaagcatttccgtaaaaatccgtggtatcaagactatgggtgacaacgagccgctttacatcatcgacgggtatcctggcgacatcaacaccatcaatccgcaggatatcgaatccatggaaatcctgaaagatggtgccgccgctgccatctacggttctgtggccgccaatggtgtagtcatcgtttctaccaagaacggaaaggaaggagaactgaaagtttcctttaatacatatatgacggtcaactcggtagccaagaagttcgacatgctcaatgcagacggctacttgaaagtgcacaacatgatgtacgagaatgcagggacaaacaagcccgcttatcttacgtacaagaatggacagaaccctaccggtgccgatacaaactggcaggatgaaatgctccgtaccggcatcgcacagaactattatgtaaacctcatcggaggttctgaagttgctaaatattcactttcttatggccatgccgacgagaagggtatctttaaaggtaactcttacatccaggacaatgcccgtctgaaactgaatgcacacaaatatatctttgatttcgatgcgagcttgaacttcaaggtcacacaaagcaaacagcctcagtattccttaaaagaaatgtactccatttcgccactggtgcccgtttacgacgaaaaccagacatacggatacggtctgaccgacatgtcggtagacggtaccaagatggaattcccaaccaaccgtaatgtcatggcagacgaccattacaaagacagaaaatatacgggttacgacattaccggcaatatcggtctgaccatgaacctcgccccgtggcttacattcaaaacaagctatacgtacgacggttactactacaacgaccgttatcatcgtgccaaatacgaagccaatgcacaagagccgagcctctatccttataactacgagtacaactcatactatcgcaagcaaacattcgagaatgtattgaccttcatgaaagacttcggcaagcactccgttactgccatggtaggtaactccatcatttctgcccatcaagataaaagttctgtcagcgtggaaggcaagaaaaccgaatatgatgtagtaggcggcagtctgagttccagcgaggttcccggcggattcttcgacccgacatctcccacaatcgatgcaggtatcggcggtacatttgccggcacaggtactttctacgattacaaccgcgcttctttcttcggacgcttcaactactcatacgccagccgttacttgctgcaagtgactgtacgttccgacggctcttccaagttcggtaaaaacaaccgttggggtaccttcccttccgtagcagtgggatggagaatcagcgaggaagatttcttccccaaaagcacccctatcagcaacttgaagttccgcgccagctggggacgcctgggtagcgagagtgcactgggctactattatgcgccaacaatgagtaacagcaatacccaatggatgagctacatacaaggtggcaatccttgggccggcatgtccaacctctatctggtaaacgacgatttgcgttgggaaactaccgataccaaaaacatcggtttcgacttcggtcttttcaacaataagttgagcggtagccttaactactattacaacacaacggaagacttactgattgaaaaagtcatgccgccttctgcaggtatctacaatcctactgtcaacgtaggaaagatggtaaacaaaggtttcgagcttgaattgaactatggagacaacatcaacggtttcgactataatatcggtttcaacctttctaccatccacaacgaaatgttgaaggcagacccgaaccagatactttatggttctgcctggaagggtgacggccacttcgtaacccaaacactgaaaggttatccggtagccagcttctggctgtatcagactgacggcatattccagactgatgcagaagctgctgcttacgtaaacagtgcaggcgaacgtctccagccgagtgccaaagccggtgatatccgcttcaaggatgtaaacggcaatggaagcatcgactccggcgacaaggtatattccggttccggtattcccaaggtggaagccaacttgtcattcagcggttcctataagaactttgacctttccttccagttcggcagtgcatgggggcacaaactctacaacgtaaaccgtctgtattatgaaggaatggacgccggtagaaactacttcacaagcaccatgaatgcatggacaccgcaaaacgcaggaacaagcatgccaagagctgtactgggtgacccgaatgaaaatacccgtgaatccgatcgcttcctcgaaaacggtaacttcgtccgccttcgccagttgcagttaggatacagcttgtccagggctttagctaagaaaatgtatcttgaaaaatgccgcctctatgtcagtggagagaatctctttaccatcaccaaatattccggtatcgaccctgaattctcttcaagcattctggacaccggtgtagactcctttgtatacccgttcacccgctcatttgtagtaggtctgcaagttacattctaatcaccattaaaaacaagaagacaatgaaaaaaattatatatatagcctctttcttatgcgccgccttactggcaggatgcgatgatttcctgacgacagagtctcccgacttttctacagacaaatactggagagataaagccgatgtagaggcaggtctatcagcggtatatggccagctggataaccgcaccggctcttacacggttgcagaagtcaagtttgttgtggaaaccttccgtagcgatgagatggtaaaaggccaggacgtcaacaactatccggaatgggctgcattgtacggattcacctacaacaatgagaactccagcatcaaagaatactggatgaacaattacaatggcatcaactacgccaacaacgtattatacggtattgacaaagtacagaccagcggtgagaagatgagtgccgatgacgagaaccatcttacgggcgaagctctgttcctgcgtgcctactatcatttcaaactgattatgagctgggagaaaatcattatccgcaatgaatatctgaccggagaatcccagactcacaaagcattgtctaccagaacggaagcatgggactttatctgtactgaactggacaaagcaggcagcatgctgccacaagaccgcccttcttccgaagcgggacgtgtaaccaaaggagcagcctactcttacctgggatgggcttacttaacccgtgcttatgaagaaagtgacaaaaaggccgaatacctggggctggcagaagccgctttcaacaaagtgaccggctacgaactggagtccgactacggaagcatgttcgacggcaccaacaagaattgcaaagagtccattctggaacttcagtttaccaacagtacggccgacggtactttccacaagcacgtactccacttctgggtagctccgggcagcatgtccggttgggacgaaatccgtgtcagcgacatgatgtacaacgaattcctgaaagaaggacgcattgccgaaggtaacatgtacgatgcccgtgcctatggttccatgatgtttgatgatccgtattactatgaaggcgggcacattctggggtacaattacgatgacatctatgatgagaattctgccacccgatataattaccgtaaatacatgccttcaacttggagcgactatgcacaaaactacgtaggtaccaacatgccattgatgcgttatgccaatgtactgctgatgaaggctgaaatctacaatgaacaaggccatccagaaaaagccattccattgattaacgaagtacgtagcgtgcacggcaaactgcctgccatgaccggaagtgaccaagctgctgttaaagcacagattgaacatgaacgtctggtggaattcacactggaaaactcacgcttctatgacctccgtcgttggggcaaactggacgaagccatgaaggctgacggcagaaccggattcagtgcatctacccattccttcctgcccattcctctgatggagattcagaccaacaataaaataaacgaataatccttttcccaaatagtatatcaaggcggcattcgcccccggcaatgccgccttgtttgctttgaaagctttatctttgcacctgcaaaaatagaccatactatctttgccactaaaaaacgacatagatatgtttacaatcatcggactaatgctcacgggaatgctgctgggctatctcttacggaaacgggacttaaagaaaatccaccaaatcatcaccctgctcatctggttgctgctgtttatcctcggcatcgaggtcggaagcaacgagcaaatcatcaagggactccataccataggccttgaagctgtgatactcaccctgggaggaaccttgggaagcgtcatcgccgcctgggcattgtggagagccttgtataacaagaaaggaggaagggcatgaaaggaagtcttatcatagtgggctttttcgtactgggtacgatttgcggcgtatgccatctgttgccctttgatattgcagaaaccaacatcagctactacgcgctttgtgcgctgatgttcagtgtagggctgagcgtgggtaacgacccgcaaaccctgaagaatttccgttcactcaatccgcgactggtattcctgcccatcatgacgatactgggaacgctagcaggctccgcagccgtcagcctgattctgacacaccgttctataacggactgtctggccgtaggttccggattcggctattactcgctctccagtatcttcattaccgaatacaagggagccgagctgggcaccatcgccctgcttgccaatatcagccgggagattctgacactgctagccgctccgttgctggtacgatggttcggaaaccttgctcccatctctgccggaggagccacgacgatggacaccacactgcccatcatcacacggacagccggacagcagtttgtagtagtttccattttccatggatttgtagtagacttcagcgtcccattcttagtgacattgttttgttctatttagctgaaaatggaaaggtgaaaggtgaaaattttccgtttcccattttccattttcaacttccaattaatcattaataatatgaagaccaaactttatacctttcttctctcttcgctgctttgcaccggtgccctggcagacaatgagccgtggcaaaacccgcaagtcaacgaaatgaacagagaaccgatgcacgcccacttcactccgtttacgaatgaagccaacgcattgaaacaacgtaccttgcccgccgacgtacggttcgacgttaattctgcaacggaacgccgtatcactctggacggcacctggaaatttcttttttcaaagaacaatgacctctgccccaaagactttcacaagcccggattcagtacccgcaagtggagtaaaattgaagttccgggaagctgggaactgcaaggcttcgatgcacctatctatacagatacccgttatccgttcccgcccaatccgccctacgtgcctaccgactacaatcccgtaggtgcttatatccgcgagttcaccgtcccggctagctggggaggcatggacatctttcttgatttcgaaggggtggagtctgcctactatgtatgggtaaacggcgaattggcaggatatgcagaagacagccgcctaccgtcgcacttcaacattacccacctgctgaagaagggcaacaataaactggcagtaaaagtattccgttatagcgacggttcctacctggaaggccaggactactggaaatacagcggcatcgaacggagtgtttatctctacgcccgcccccagagccgcgtcaaggacttccggatgacagcggaactgataaacaactacaaggatggcgaactaaagctggacgtattcctccatcggcctaaagccggagaaacggtggaagtcaaggtaatggacaaggacaaggttatctatgaccggaaaaagtccataacctctgccacagacactttgtttacccagcagcaagtgttcccgaatgcacgagcctggaatgccgaaacaccgaacacctacacgctggtagtcagcacctttgatgcacaaggaaaaccgcaggaatcctttacgcaccttttcggcttccgtaccgtggaaatgatgaacggcatgcagatgattaacggccaggccgtcctcttcaagggggtgaaccgtcacgagcacgacccgcacaagggacgtaccatcaccgtagcttccatgatacacgacatccagctgatgaagcagttcaacctgaacggtgtacgcaactgccactacccgaacaactatgcgtggtacgagctttgcacggaattcggactctatatggtagacgaagccaacatcgagagccatggcatgatgttccacaaagatgagacccttgccaactaccccgcctgggaggtgcctttcatgcagcggatgagtcgtatgattgcgcgcgaccgcaactactctgccatcgtgacttggtccatgggcaacgagtcgggctacggcaagcacttcgaaactctgtatgactataccaagaagatagatcctacccgtcccatacaatacgaagggggtggctacaactccaagagcgacatctattgccccatgtacgcacgcatctggaggttgcgccaacacgtgaaccaacgtgatgcccgccccatgattctttgcgaatatgcccatgccatgggtaacagcgtaggtaacttccaggactactgggacttgatttacaagtacgaccagctgcaaggcggtttcatttgggactgggtggaccagacgtttgccatcaaggacgagaaccagcacgacatctgggcttttggcggcgacatgggatttgtaggcgtcgtcaacgactccaacttctgtgccaacggcttgattgctgccgaccgcaccccgcacccacacatctacgaagtgaagaaggtattgcaatacatccatttcgaaccgctcgccttcaccccgaacaagataaaggtcaccaactggcacgatttcatcggattggaaggatataccctccgctgggcagtagaatgcgacggcaagaccgttcagaacggtgagatggatttccccaagattactcccagaaactctgccaacatagaattgccactgaaagcgctgcctgccgacggcaaagagtatttcctcacactgcgtgcattcaccaagcacgaagcgccattagtaccgaaaggacacgaggttgccatcgaacaatgggaactgccttccgtcccgtcagccaaaaccgttcagccggtggagggaacgttgaccgtaaaccgcaacaacgaagcattgaccgtgaaaggcaataacttccaggtagctttctctacccgaaacggtgaaatgacagagctgaactacaacggaaagaatctgattaaggaagggctgcaacccaacttctggcgcccgttgactgacaatgacattccaaacagacatctgatacgctgcggcacttggaaaaacgctggacgcgatgccaaactacagcatatcgaagttgcggaagccggacaaacggctactgtcactgcgacctaccgcatggaagaactagatgctgatttgcagactctctacaaaatcactcccgacggcaaggttcaagtaaccatgcacttcacccccggcaagaagccattgagtgaaatgccgcgcctgggcatgcgcatgatactccctgccgaatatgaaatgatgacctggctgggccgtggtccgcaagagacgtatgccgaccgcaagacgggagcattgataggcctctacaacgccacggtgtgggaacaattccatccgtatgtacgtgcccaagagacggccaatcattgtgacgtacgctgggtggccctacgtaatgcaaccggcgaaggcctgctggtagtgggcgaggaaccgttgagcgtaagcgcctggaacttcccgatggaggacattgaataccgtccctcgcagatggagcgccgccacggtggaagcatccagaagaaagatatggtatggctcaacatcgaccacaagcagatgggcgtaggcggtgacaatacttggggagcacaagtgcatcccgagtacaccatcactccacacgaatggaaatacagcttcacactcgctcccctcgcaccggaggacgatgcggcggaacaagcgcacaaataaccgttaaatacctcattcatatgaaatacaaatttatacgcatactctgcttcacattgttggccgcaggcatcgcatcctgcacccccggcatgaaaagcactacggagaaacggtataccttcgccgacatactggacatctcctatactcccgacaccctgcaccgctgctacggttggttcaccgacgccggctcgtggatgggcttcacgctgcccgaacggcaacaatgggtcaacggcttctgcggccccttcagcctcgatatgttccgccgccagtggatggcacagtcagccgccgtcgtaagctttgccaaagatacacaagagatttttgttccggattccacttgctattaccccggcgagctctatatgtcggcacattccacccacgggagcatcacgcaacggctcaacttcacaagtgcctcgaccgccttgctgcgcatcgaagccgacacggctgaagacctgctgttctccggtagccaatggggcaaagacatcaccgtcagcgtagaacagaactccgtcatcgcccgtcatcccagtggcgaaaccgtaaccgtgacctttactcctaatgtagagctggccaagactgacaataactatacagccctcgtccgctctccgcgctaccccgtcaacgtagccatctctttcttcacttccgaaaaagagatgactgccggcctgcaaaacctgccgggcttgctcaataatcccacccccgccctgcaagccaatgccgaacgttgggaaggttacctcaccaagatactgcgcaaggacatgaagcccgaatacgaccgcatcgccgtgaaagccgtcaccacgctcatctccaattggcggacacaccgcggcggattgcttcacgaaggcatcatcccgagccatgccgtaggttatttcgtcggcttctgggcatgggacagttggcgcttcagtgccggaaccgccaagttcgaccccgaactggccaagaacaacatccgcgccatgttcgactaccagcaaccggacggcatgattatcgactgtatctataccgacccctccgagaacaatgcccgtgacagcaaacctcccttggtatgctgggctgtcgacgaaatcttcacccatacgggtgacaccgccttcgttgccgaaatgtaccctcaactgctctcctattataaatggtggtacgaaaaacgcgaccacaaccgcaatggcatgtgcgaatacggtgctaccgacggaacactggaagctgccgcctgggaaagcggtatggacaacgccatccgttttgacggcgccgtgatgctgaaaaacgaaggctacgaggatgcctggagtatggatcaggagagtgtggacttgaacgcttatctggcactggaatgcaaactgctgaagaagttctccagcctgctgaagatacctttcgacgcaccggactacagtagccaggtagccgactatttctttgacaagaacatcaacttcttctgcgaccgccgtctgaaggacggttcattcatcgaagagccgggctgcgaagcctacactccgttgtggacccgaattgccacacaggcgcaagtggacagcatgctgcccatacttcaagatacggcaaagttctccacgtatatccccttccctaccattgccgccgacaatcccaaatacaatccgcgcggctactggcgtggccccatctggctggaccaaacctactttgccatccgcggactgcgcaactacggctacaaccagctggcagatgaatatacgctgcaagtcttcgaccgcctaagcgggctgaaagagggtgctcccatccacgagaactacggaacccataccggcggacgcctgaaagctccccatttcagctggagctcctcacatctgttgatgatgtacgacgattacggtaaataaaccgagtctctatataacggaacggtttgtttccatacagcaagacactttgtttctttcttttgaaacaaagtgtcttgctgtatggaaacaaactattttgtacgttgagacaaagtgttccgctaaagagcacaaaaaatatgcttattaccgataaacctgcaccggaagctctccacgcaaagctcccagcgcattcagtaccaatgcttccaattcgtcttctccgggatagacgtgaacaggagcaaggaaagacacgcgctcctgcaatcgtgaagtgatgtactcggaatgtgccatacctcccgtaagcagaatggcgtccaccttaccataaagcacaacagcagcggcgcccacacacttggctatctgataaatcattgcattcagcaccagttccgcgtgcttgtccccctcctctatccgctttacgatggcaggaacatctgtcgtacccaaatgtgccgtcaaaccggcacgaccggaaatacgcttcttcagttcctctttggtaaaacgaccggagctgcaaacatctatcagctgcccggcaggcaaggtcccggcacgttccggcgagaaaggaccttcaccgtccagtgcattgttcacgtcgacggcacgccccttgcagtgtgtccccacagaaatgccgccacccagatggcagataaccaggttcaagttttcgtatcgggtgttgtgctcggcagcatatctccgggcgatggcacgctggttcagggcatgccaaatggtgatacgtggcatcaaaggcgaacccgtaatgcgggctatttcatctaactcatccactacaccgggatctgcaataaaagcctggcaaccgggaagcagagctgccagttcggaagcaatcaggcatcccaagttacatgcatggctgcgcatcgcatgggcaatatcatccaacatggcgtcattcactacataaacaccacccggaatgggtttcaataatcctccacgccccacgatagcgtcaaattcaaaagggattccattgttgtccaaagcttccagtaccaacttcttgcggaattcgaactggtcgatgatacggggaaattgggaaagttcctccaccgaatgccggatgttgagtaccagacggggagtttcatcctcatagacagcaatttttgtcgaggtggaaccgggatttactgccagtattttcattgattacgatttacaaattacgaactacaaactactaattacaattaagactctttcaccccgctggtcaggcaagccatggcaatgctgtaatatttggacaaaccagaatcgctacgcgacggtaataccaccggacatgagggtccttgcagcaacccggccatatcggcatgagaaaacagagatacagccttataaaaagcatttcccgattcgatgtttgggaatatcaacacatccgcctccccgtcaatcggtgatacaatgcctttgatgttaccgctcgtcttctcacaagaggtcttcacatctagcggaccgtcgatgatgacattgccgaactctccggcttccgccagttccacaatattcacatagtccaaagaatgggggaatttggcgctgaccttctccgtgcaatgaatcagcgcgatacgtggctgctctatcccgaaatggcggcaagtatgaatggcataccaaatcatttcaatgcgctgttgaagcgtcgggcggggaatgaccgcagcatcggagaaaaagagcagtttatcgtaagtaggtatctgcatcacggccagatgggtcagaatctttcctttaggcaacaaaccatgctccttgtccagaatggcacgtagcaaattgtcggtattgatgatgcctttcatcaggatatctgctccaccctcgcgtacgatacgcaccgcctcacgtgcagcctcatcagaatcttctatatgcaaggtactgacatattgaggatatttcttcaaggtgggatatttttccaatatggcagaatcgccaatcatcagaaattccgcaatcccctcctccaaggcacgggatatggcatattctgtattagggtcattggcacagactaccgcaatacgtttcctcttattcaaggttttcaggtgggctgttaactgggcaaagttccgtattggttccataacgttagatttttagcaaatatctaaaaaaatgtcgagaaatgcagcatttatcccgttgaaattttatatgtttaatatcattttgatatattcactacagatgacacgaatttgcacagaacacattcccctctcctcgctctcttctgttaaaaatccgtgttaatctgtgatatctgtggtgaattgtgtacttttgcccaaaatagattgataatatagtatgggtagtcttattttccctccgtatctgcaggaaggtgaccgtgtcattgttctctccccttccagcaagattgacaaatctttcctgaaaggcgcctacaaacgtttgaagtcctgggggctggaagtcgtattcgcaaagcatgcgggaagttccaacggaacgtatgcaggaagtatccggcaacgccttgaggacctgcaggaagccatgaacgatgaagaagccaaagtcatattctgtagccggggcggttacggagccgtgcatctgataggcaaactggattttaccaagttcaggcagcatcccaaatggctcatcggattcagtgacatcaccgccctccataatctgttccagcagaatggcttcgcgtcgttgcacgcccccatggcgcgccatctcacagtagaaccggaagacgacttctgcacacaagcactgaaggatgtactgttcgggcaggcattgggaggaacggaagcattcagttatgtctgcccggggcacaaactaaatcataaaggaaagggaaaaggcgtgttgcgcggtggcaatttgtcagtgttctacgggctgcgcggcactccgtacgacattcccgccgaaggcaccattctcttcatcgaagatgtgggagaacgcccgcatgcggtggaacgcatgatgtacaatctcaaactgggcggtgtcctcgacaagctttccggcctcatcatcggacaattcaccgaatacgaagagaacaagtccctgggaaaagacctatatggtgcattggccgatttggtgaaggaatacgattatccgatatgtttcgattttcccgtcggacatgtcagcatgaacgtaccgttgataaacggtgctgcggtaacattggaagttggaaagaaagaagtgaaactaagttttaatacagaaagagaatgaaacggaattatacattcatcccgttgctgctgttgctgattgtagcgatagtggcatgcagcaacaacagcagcaagtctgcagccgataatgacagtgagggcgatgcgaccaaagcgactgtccaagtaccccagttcagtgcagacagtgcataccaatacatacagacccaagcggattttggtccgcgcgtgcccaacaccgccgcccacaaagcctgcggagaattccttgccaagaagctggaggaattcggcgccaaggtatacaaccagcatgccgacctggtggcttacgacaacaccatcctgaaagcgcgcaacgttatcggcgcctataatccggaaagtaaaaggcgtgtactgctctgtgcccattgggacagtcgtccttatgccgaccaggatgccgacaagacgaagcatcacagccccatcctgggtgtgaatgatggagccagcggtgtaggcgtattgctcgaagtggcccgccaactgcaacagcaggctccagccatcggcatcgacatcatcttctttgacgctgaagactatggcatcccctacttctatcaaggtacatacaagaacgacacttggtgcctgggctcgcaatattggggacgagtaccccatgtagacggctataatgcccgctacggcatcctgctcgacatggtaggtggaaagaacgccaccttctacaaggaacagttctctcaaagaaccgccggtaagtacgtgaacaagatatggaacacagcccaccgcctgggcttcggcaacttcttccccaaagaaaaaggcaccgaagtgacagacgaccatatgtatgtatacaacctgcggcagattccctgcgtagacatcatcaactatgacccgaactgcgacaccggcttcggtgacttctggcacacgatagacgacaccatggacatcatcgacaagggcactctcaacgcagtgggacagaccttgctcgaaatcatctacaatgagaaatagaccatcaaatagtaaatcgtaaatagtaaaatagtaaatcccatgataagtatcaacgaagtacaagatgaagtaattgccgaattcaatgatttcgacgattggatggaccggtaccaacttcttattgatttaggaaacgagcaggaaccgctcgacgaaaaatacaagacggaacaaaacctgattgaaggttgccagagccgcgtatggctgcaggcagacgaagtggacggaaaaattattttccaggccgaaagcgacgcactgattgtgaaaggaatcatttcactgcttatcaaagtactctccgggcacacaccggatgagatactgaacgccgacctctatttcattgataaaataggactgaaggaacacttgtcgcccacccgtagcaacggactgctgtctatggtaaagcagatgcgaatgtatgcgctggccttcagagcgaaaggcatctaaaggttacgaccgacaatatataagctaataatcagcagattatatttaccggatgtttaccctataatgtaaaagccgttactccagaatgtaacggcttttacattatgaagtaacgacgtttaccatagtatgtaaaggcgtttaccgtagtatgtaaaggtgtttactgtagtacataaacggagtttcttaaggcggtaagcatttcaacctctacttgcgccttcttctccctatttatccctccttaaactccagtatatcccccggctggcaatcaagttccttacagattgcttccagtgtagagaaacggatggccttagcctttccggttttgagaatagagagattggcaggcgtaatatcaatcttctccgccagttcgcccaaagatatctttcttcgggccatcattatgtcaaggtttactataatcatataattgtgttctatttatcaattattcttttcccactcacaccaccagtcagtgtaccgtttcgtcaaccggtaataaccatatatgcacagatacatccacggcattacaatatagactttccacttcccgtcaaaggccggaaacaagaggagaaaatagacaatacttgccaacaataaaaccgccacaagtccgacaacgaaatacagaccatatttcacacttttcttcatatcgcgctcttcacttttatttaaatcgtcaactcttgttcctcacgcatacgaactcccatcttaaaaagatagcccataaagatgatgaaaactcccaataacacgaatatccgataagaagtatcagtcggtactccttcgggagtaaaccaggagagagttacctgaaaaagcccattcaatgctatcagcaccccaatggtttgtatcaaagatgaattctgataaacaaacacttcctctttcttcacattgcggagaatgagaaaaatacacaagccacatattgtcatcaccagcattgttactgattcgggtaatatgtgccagataaaattagcagtatcatcctttcccaactcatagcacaatgtcagattacgaacaatgccgccaccaatacatagtccacagaaataaaacagcacattcataataagcgctatccgtctctttggttcctttggttccttttgtttcataagtgtcataatccctcctctcacttttaaatagtcaagtcctgttcttcctttatcttcaccccggcggcaaatatctcggtgaaaagaattataataaccagggatgtgaaatccgtatcatgcgatgcaaccacttcatagcccagcagagccacttgcttcactgcttcaagatgattcagccaatcgtgcaaagtcatcaagccgtacaatgcagcaaacgaataagtaaagaaacgcaaccgggctacattatccgaagtaaacacttcccgctttgagatggataccagcaaacgtatcagacaatagattcctacaaagaaaggaatgatggcaaacatggcaaagaagttcactatggaactccagacagtggggacaatcacagtgcctattctctttacctgataaggtactgacttatcggcaaaacgattcgtcaaggaatcgactgctgtcgtttccaaaggtcttacatccacatataccttatcaaataaaccggaatactccggctgtggagttcccgaatgcacatttacactattgtaaccctcaagaaaactattcttcatatccacccagcccgctatcatcgcataggtaaactctgcaacaatgaccaatatagccaggatacccaatatacttatctttttcataatcctccccccacattaaaccgttaaatcctgctcttcctttatcttcacgccgatggcgaatatctcggtgaacaatgccaacagcatataattgaaccaagcatacttgaaagaataaggcaacacctcgtatccctccagccgcacttgagaagccaagtcatgatagatgccccattgctgcaactcgaataaaagactcaccgaaatcagcgcatagacaaagatgcgcatccgacgcacattcttgtgcacaaacacctcgcctttcgtggcagtaagcaccagccgcgccacactatagaacccgtaaagcgcaaacagtcccgcaggaaacagcaagaacgatacccaccgccacttcgtactacggaaaccttgcaccgatacctcacttgtattgcaatacatgggcgtatcctgtgccgcactaatcaaagtatcggcaggcagcgtatcatctgcccgcaccaaaagtgacacggagggtaaggcatgaaaatccttctggtcgcccgcctcattccagccgtccataaatccactaaacatatccgttacaacactaccaataaacactaccaaagccaggaaggcgcatactctgattttattcatatctctgtccgttcttcttattattaaatcgtcaaatcctgctcttccttcattttcaatccaatggcaaacacttcacctacaatcagcgaacaaagcccaagtaccagcgtggtagtgctcaccaattctgagaggctcagctcgtaaccatgcagcgagaatacggtatcgatacctataaaatcaagatatgatgacgcaaaggtacagcagaagctgacaaccagtgccattcccaatcgacgcagccgacgtacattccgccagttgaagatgtcggacttgttgatagagattatcaagcggataaacaatactaccgcccaaagggaaaagcccaaatgcagatatatcagcaaatattttgccaccactttcccgacagaatcatgagaatctacgctgaccatcaacgaagagtaggctgcaggcacataactcctgcttttctcattgtagacggaatccctgaagaaatcaaacgactccatggaagaaggtatcaggttgacaaccttcaggttcatcagttccttgtaggcagcaatgtcactccctttctttcccagctccagtccggtctgcgcccccatcttggctcccagaaagatatagtacccctgctccaataccgagtaactcagtacaagcattaccaccaggcagagaatgttcaatcttcttttcataattcagttgttgttgtattagtatcagatatattatatttattcagttgtttcaaggagagtagaagcaacaatatgaaaaccactgcccaaaccagtacatacgggttactcagcagatgtgtcacatcctccatttcaggatgtttcaggctcagatagacagacaagccgttattcatgatatgtatcagaatacatgccataagactccgtgtcttataataaagccaggcaagcaagaaaccgatgaggcaagcacctattatctgaaccggattcagatgaaagataccaaatatcaacccggaaaacaagatagcctttgccgggctatatctgcgaagcagctccttggtaatggcaccacggaaaagcagttcttccagtacgggtcccaaaacagaaatacagagaatacccagccaaccggattgcagtatatcaaatgtctggtccaacaaattgggcaaaaaagtaagttcggacatcagaagacctattatacatatggaagtcattccggcaagcaggctccatgccagataagggactgacaccggagaatacagatgcttgtctcccgtcaggtagttcttgcgccacaagtacagtcccatgaaaacaaagcccagcagcatggtaggcgccacagcaatctgaccagccttgtccatgtcgaaagttccataagcgaaatacgtatacagcagacagaaaggtcctgcaaacagtgctcctacaatctgcatcaaaaagtaaatcaatactagttttattgccgttttcattgttctattcgtctaaaagttcgcaaagatacacattttctctgtcaatccgtcaagctgtggcaacaagtcccatcagcagcaccatcactgtagaaagtgacaataccaatagtgtaatactcatgaatgctcttctcataacctaaacccctccctcatttctatattgttcttcatttattttactgccaggagcaatacgtcttcctccgcagtggcatgttccaccaacagattccagtcgttgtccttcttactccatttgtaactcaagtagttgatgtcatctcccgcctgcagataaacagctttttccttcacatcggagtaggcattcgtcttgttgtcccacaaggcatattccacatccgtaccggcttccgtataattgtagttcaagcaatagaagcgttcaaacgcctgctcaatctcgttccatctcaacgcctccttctgtatcgtacgcccttgggcatcataggtgaaattgtatttcaaatggttctgcagaaacttaccgttctctactttatatacaatttgggactccacctgatttccgttcatcacttcattataggcaaagttttcctggatattaccaccaaaagcatttatcactactgtcactacaaaaattgttgtcattactaaagttttcataccgttattgttttattagttctttattttgtttttcgataatcatttatcgtttttcgatatgcaaataaaaggcctttttttgatatgacaaagaaaaacagaaaatatttatcgaaaaacaataaaaaaaacacgttttacgataaatatacagaaaacaaacacttcaaacgggaaaatacatagaactgcaaggggataaatgacctcgccttatgtttataaagaaagaatggatttaatctccacctcgtcacggtgaagctgggcaataagttcttctatactgtcgaatttcagttcaggacgggtgcggcgcacaaaggaaagacgcatcggctgctgataaatatcagcatcaaaccggaatatatggacctcaatactgcgatcgggtccgttctccaacgtaggccggtagccaatgcttagcataccgccgtactccttgccttcaacacagacacggacggcatacacaccatcgcagggaatcagcttgtcagaatcggaaacacggagattagccgtaggaaaacctatcttacgccccacctgatagccgccgacaaccgtaccgtccaaaaagaaatcatatcccagatactcggcagcttccgaaacgtttccctccagcaacagaccgcgaatagccgaggagctgacagtaacctccgttaccgatgtctccttactataagaatacgcgcgtgcaagaagcacctccatacccaattcgcgaccatagtgcacatagtcttcaaaaccctcgctgcggttatgcccgaaacgatggtcgtaccccactaccaaagcttgtatctgatagcgatccttcagtatggacatgaattcccgtgccgaaagccgggctatttcaggagtaaaatcaagcatcatgcaataatccaccccagtcttggcaagcagggaaactttctcatcacaagtggtcaataacttcggatgataatcggcctgcatcactttacgcggatgtaccggaaaagtcacgaccgacgaagcaagcccacgcccggcagctaccgcacacacttgctctatcaggtagcggtgtccccgatgtactccgtcaaagaaaccgatagtggctacacttggacgggaaccaatgtccgatgtttcacaaaacaactgcatgtctccaatcctcgtgggcctttggcgtataggtagaaatacccaacgcctccgctgtccggcaattggcctcagaatcgtcaatgaaaagagtctcgttgggaagaataccggtctcatccagtactttctgaaatatatcggcatccggttttgccatcttcatctcataagagagatagatatgctcaaaaaagtcctccgcacggaaagccttgtagcgaaacgcgtgcagacacgaccattgccaatggatttcattggtgttgctcagcagatagaccacatattttttgcgcagttccaacagtaaatccaatttaaaagtaggaatactcactaggaaactgttccaggcgtcatctatctgggcatcagtcaccggtttccctatctttccacgaatcacttcccggaactccgcactggtaatcaaccctttttcatatttctggaagaaatcctgctggtgatagaggtccaacatgacttccacgtccggcaatcccagctttctgaaattctctaaacagcgctggcggtccaaatcaatcagaactccgccaaaatcaataataaggttcttgattcctcttcttttcatcactatttctgtgttaaacgtcggataaggcgaaccagttcacctatccacaaaacaaacgaggtagaaacgacaatcgtcatccaagtcataaaatcgagcggcactgtgcggaatacagctccaccaaactgtacaatcagtatctgtccgcccaaaatggcaagtataatcagctccatgccataagatttggaaatacccttgaacgccgagtccgaagtgccgaacacacgtgcattgaacaagttccagaactgaagcataacaaagaacgtgaagaacacagtcaaccgataggtagtcatccccccctcttcactgttaaaccagaagagcattcccataagcaataccagaaaggcaaaacccattcccaaaatgtaatacctcatggacttggttataatgaaatccgtactcttacgcggcttttccttcatcacgctctcactgggtggaatggacgccaaggccagggccgcaaacgtatccataatcaggttcacccacaacatctgcgtgacggtcaaaggaagcgtcgtacccaccagtgaacccaggagaacgataaacaaagccacaaaattgatagtcagttgaaaaacaatgaaacgctgtatattcttatatagagaacgtccccacatcacggccgtacctatactgttgaaggagtcatccagcaacgtgatgtcgctggcctccttggcaacggaagtcccggtacccatcgaaagtcccacttgcgcatggttcaacgcaggagcatcattcgtgccgtcacccgtcacagccactaccgcacctttctgctgcaacagttgcaccagacgctgtttgtctgtggggcgtgcacgcgacattatcttcaagtccatcacacggtccaatgcctcctcatccgtcaattcggcaaatgcagctcccgtaatgcggttcttttccgtatcctccggtttccacagaccaatctggcgtgctatctcggtagccgtacccggtgtatctcccgtcacaatcttcactccgatacctgccgactggcatttggcaacggccgcaggcacatccggacggataggatcactgatggcaaccacaccgaggaacgacaagtcattttcagcaaccaatgacacacaatcagacgcttccgcatcatccacaatcttgaatgcaaagccaagtgtacgcatagccatattctggtagttgagcaactgagcctccactgtagaacggtattccaccgcatccacacgcttgccgtccaacatgacatccttgcatttacccaaaacaatctcgggagctcccttcacatacagcaccttcttcccaatcaggggggattgcaccagggtagccatgaatttcctttccgtagagaaagtcagctggtcgataaccgtagctttctcacgcagcgccagatagtcgcatccttggctgttcagccaaagcagcagtgccacctccgtggggttacccacccctttcggcttctcgccaggcacctcttcttccaggaaagcagtggagttagcactgataccttccattaccagcttgctgaggtcatcattccccaactgcccgttattcttcaaaccatagaaattgggttcatgcacctgcatcagattttgggtcaatgtaccggtcttgtcggtacaaatcactgtaatggctcccatcgtctcgcatgcatgcatcttgcgcaccagattgttggtggagagcatacggcgcatgttcaacgccagactgagtgttacgctcatcggcaatccttcgggcacagccaccacaatcagggtaactgccatcataaagtattgcaaagtagcctgcaaggccggcagccaatcacggaaggtgtggaatgaagaaaagtcatagaccagtaccacatcctttacaaagaaaatgagaaaagccagacccgctacggaaaagccaatctttccaattagattggccaatttggtcaactgaatattcagtggagtaggttccgtattctgttcggtactttgacgtgccactttaccgatttccgtagcatcgcccacagcctccacacgcatggcgccatgtccatccaccaccgttgtaccgcgtaaaatgcggttggaagcatacgtagcctcttcgtcaaagtcggcttctacggtagttttcgtcactaccggctcaccggtcagattcgattcgttcacttgcagggaaatggcttccagcaattcaccgtccgccggaacctcttcaccggtttccagcaccacgatatcacccaccactacatctttacggggaatctcctgcacatgtccgttacgaattactttcaccaaagtttcttcgttcactgcattcagcaggtcaaacttctttccggcatcatattcaaagaagaaaccgataccggtagccagcagaatggctactataatgccgatagtctcggcatattcattctctacaatggaaataatcaaagaaaacagagcggcaaccagcaatacccttactacggggtcctcaaacttctccagatacaatttccataaagaaggccgtttaggaggcgtcaataaatttactccatgttcctcgcggctcttccgcacttgttcgtcggtcagcccgacatgataataatcatcctttattgcagtcatgcaagtctttaggtttaattttggaacgcaaaaatacaataataatccgggaaaacaatacctatataatgattagtgattaattgactgtcatcgattctctttttcccttaccagtttcggtccggttgcaggctcccacggcaatgtgaaccagaaagtcgaacctgccccttcttccgattccacgcctatttcgcctccctcaatttgcggacaatggtctggcaaatggagagccccaatccggtaccttcctttccctgcttcagcttgacgaaacgttcaaaaacatgtggcaacttctcctaaggaatatcggttcccgtgtcttttacgtagaaataactttgcacaatttccagtaacagtatctcctcctcgcccgtcgatgcagaggccagcaattccgagaatccgacaattacgttcaacggagtacagacttcatggctcatattcgccagaaacaccgatttggaacagccggcattctctatggcatcccgcataatcgcacagaacagtttgtcggccattttcataaatgttgttttaataagaaacaaaaatagactattttgttcaacaataaaacaaaaagggcttttaaacgttattatagaagaataaacctaaaaaagaaatttatggaaaagtacatttgcactgtatgcgattatgtctatgaccctgaattaggcgaccctgaaaatggaatagaaccaggaacatctttcgaagaccttcccgaagattgggtttgccccttgtgcggagtaggcaaagaagaatttgagaaagcgtcctaagacgctttcttttcttttatatcgctgctggcctccactacattcaccacatagtcgcccagcttttcacattctgcaatgatgtccatatagtaaacacccatctggtaatcatattccttgttgttcacatccaaaatattctggttcttcagctgattgcggtaattattgatttcgttctccaaattaaaggacttgttcacatccgcgcctgcatgctccggatgttccaccacgacaatcatctgctccaaggcatcatccgtcagcttcatcatgaaatggatatgctcgtactgcttctcggtgaaatcctggttggtctggcgcttgcggttgatggtacgtgccagattatagcagctgtcgccgatgctctctatctccgtcacttcacgcagcatggcacgtatctgcaacttactttccgaactcaggcgcccttcggacacttgattcagataattggcaatctccagctccatgctgtcactgatattctcgtacttctccacacggctgaacactttgttgaaatcatcatccttctccgtatgcagcaagtcctgcaccattccgaacatacggcgggtacgttcggcaaagagatgtatttccttgcttgcctgcaagatggacagctctgccgtagaaagcataccgcccgagataaaacgcaagcgatattcctcgtcctgctccttcattggaataatggcacagaccgtacgttcgataaacttcacgaaccatatcaatatcagcacgttgcagatattgaagcaagtatggaatgccgaaagcttgaaggatacggccacagccggatctttagtacccatcacgttctctacgaaccatgacacagcctcggtaaagggggtaaaaagacacaacacccatatcacaccaaacacattgaataccaaatgagccaaagcagccctcctcgcctgcgtattaccggtcagcgccgcaaggtttgccgtgatggttgtaccgatattctctcccaaaaccagtgctgcccccaattcgaaactaatccagccgttggcgcacataataagcgtaatggccatagttgccgcagatgcctgcacaatcatggtcaacaccgtaccgatacccacaaaaaggagtatggagataaagcccatgtcggtatagtcctgcacaaatgacagcatatcaggattttggctcaagtcaggagcattgtttttcaaataggaaagccccatgaacaagaatgagaaaccgaaaataaattcaccgacagacttgcggttacttttttgagagaagaggagaggaatgccgaaagcaagaagaggaagagcaaaggcggcaatgtccaccttgaaacctaaagctgaaataatccatgccgtaacagtcgtaccgatattagcacccattatgacacctatggactgtgaaagcgttaacaaccccgcattgacaaaacttacaaccatcaccgtggttgcagaggaagattgtacaagtgctgtaatcagcacgcccgtcaacacaccggtcactctgttggttgtcattgcggtcaatattttccgcagtctgtcaccggcaaatttttgaagcccctcactcataatcttcattccgtaaagaaacagtgccaatgagccgagtagctttaaaaaatcataaaaagaatattccatctttaattatttaaggtgtttcattccttcacgtgttataatgtcctatatttaacgtgtcaacccactaaaaacgagacatcatgaaacacatgttacaaatttgttgcaaaaataataatatttctaaagaattccctatagggagctcacttttggatatttattacggttttaatctaaatttcccctatcaggtagtcagtgcaaaagtcaacaaccgttccgaaggactgaatttccgtgtatacaacaataaggatgtagagtttctcgacatacgtgactcctcaggcatgcgcacttatgtccgttccctctgcttcattctttacaaagctgtcagcgagctgtttccggaaggaaaactgttcgtagagcatccggtatccaaaggttacttctgtaacttgcgcatcggccgttccatagagctggaagatgtgaccgccatcaagaaacggatgcaggaaatcatcgccgaaaacatcccctaccatcgtgtagaatgccacaccaccgaggctgtgcgtatctttagcgaacggggcatgaacgacaaggttaagctgctggaaacctccggctcgctatatacctattattacacattgggcgacaccgtagactactactacggcaacctgctgcccagtaccgggttcatctggctgttcgacatcgtgaagtattacgacggcctgctgctgcgtatccccaacaaggagaacccgaatgtactggaagaagtggtgaaacaggagaagatgctcgacgtattcaaggaacacctgcgctggaactacatcatggggctgagtaacgtgggcgacttcaacctggcttgcgagacaggccatgccaccgacctcatcaacgtagccgaagccctgcaggagaaaaagatagcccaaatagctgacgacatctaccaccgcggcgaaaacggaaaccgggtgaagctcgtactcatctccggtccatcgtcctccggaaagacgactttcagcaagcggctcagcgtgcagttgatgaccaacggcctgcgtccctatcccatctcgctggacaactacttcgtagaccgtgaagacaccccacgcgacgaaaacggaaactacgactacgaatcactctacgccctcgacctcgaactcttcaacacccagctgcaggcattgctccgtggcgaagaagtggagctgccccgcttcaacttcaacctcgggaagaaagagtacaagggcgacaaacttcgcatcgacgagcataccatcctcatcctggaaggaatccatgccctgaaccctgaactgacaccacagattcccgccgccagcaaatacaagatttatgtatccgccctaaccaccatctcgctggacgaccacaactggattcccaccacggacaaccgcctgctgcgccgcatcatccgcgacttcaactaccgcggctactcggcacaagagaccatttcacgctggcccagtgtacgtgccggcgaggacaaatggatattcccctaccaggaaaatgccgacgttatgttcaactctgccctcttgttcgaattcgccgtgctccgctgccacgcagagcccatccttaccagtgttccacggaactgtccggaatacgcagaagcctaccggttgctgaaattcatcaaatatttcacccccgtgcaggacaaagaaattccaccgacatccttattgagagaatttttaggaggcagtagcttcaaatactaagtttttattctaactttgtgagcaaataaaacaaacgtacacatgaaaaaaattatttcgatacttctcttagcgactttctgcatctttactcaactccatgcgcaaaaccgtgcagacgaattgatgaaacaagcacaagaaaatcttacgaaaaaagaatatatcaaagcccgctatctattcctgcaagcctacaatgcctttgccacgcaagacaagtatgcccaggcagtggaatgcggcgtcaatgccagcgccctctaccatcgggagaattactataaagaagcttttgaactgctgcgcggtgccgagcaagtggtggcaaccggcgaacagaaaacgggcaaggccatgcccaacctacgtttccgcatcaacaaggaacgcctgcagatgtacatcaacctgaaaaatcccgcacgtgccaaggaacagctgaccaaactggaagagaccgccaaagcctctcacaacgactctctgagcaacgacctgctttatacgcaggccaactattactacaccttcggcatgaacacacaaggtgatgcggctaccaaccgcctgatagggcaatataaggaacagaagaactacgccaaagtagacgaatgctacaagactcttatcagtatcgcccgcaaagcaaacaatgccggactggtggcacgcacctacgacaagtacatcctatggaccgactccgtaaaggcgcttaccgcccaagaggaactgaacgccctgaagaagaaatacgatgaaagcctggccactatccaggagaaagatgattccctaagcgccaagcagtacatcatcatcgggctttgcatactcgccgccatccttgccgccgcactggtattcggcgccatcgtattgctgcgtttcatcatcctcacccgtaaacagaagaaggccatcagcattgccaatgagcacaatgagctgaaaaccaaattcatccagaacatttccgcccagatggaaccgacactggacacgctcgacgcctcactgccgggcataaaagccctgcatgcattctccaaccatatccaggaactgtccgagttggaaactaccttgtccgaaccctacgaaatgcaggaaaagaatatctccactttctgtgaaggcatcatggacaaaatcaaagggatgacacaagaggatgtcaccttgaccgtgaacgctccaaaactgaatgtgaaaatcaaccctgagcaactggaacgcgtcttgttgcatttgttggaaaacgccgccgagcacacccctgccggagggaaaatatggctggacttcaagaaacgcggtgcgcacacccaccagttcatcatcagcgacaccggttgcggtatccccgaggagcaacgcgaaaacatcttcaagcctttcaccgaagtaaaggacttgacgcaaggcgacggtctgggactacccatctgctcactgattgccaccaagatgaacggcagcctgacactggacagcagctacaacaagggagcacggttcgttctggaactacacgcataaaccatacatattgtatttgaaagccgcttgtcaccggcattaccgggacaaacggctttctgtatatattaaaaatgtggttatcaacgtaatgcctccacctcttccggcgtcagcggaattttcttacccaaacggtgcgctcccgtttcggtaatcagataatcctcctcattgcggatgccaccgaaattacggtattcttccaccttatcatagtcaatgaagtccataaacttcttctctcctctccacaaatcaatcaactcgggaatgaaataaatgcccggctcaaccgtatgcacaaagcccggttccagagggatagcaaggcgctggctcttgcgaccgaactgcgtactcttgggctggccgtcatagcctacccaaagctcacccaggttctccatatcgtgcacgtccaggcccatcatgtgtcccagtccgtggggatagaacaaagcatgcgccccttcgcgtacggcatcttcagcattgcccttcattaagcccagctctttcagcccttccaccatcacttgggcggaaagctcgtacaccttcatataaggaatgcccggacggagggctttgacagactctaagtgcatggcgttctggatttcgtaaacggcacgctggcgtggagtaaaagctttgtccgcaggcacggtggacgacatgtcgccacagtaacccgaaggaagctcggcgccggcatcaatcaggaagaggtcacccggctttactttatttccatgatagtggttgtgcaaagtctgcccgttgatagtagcaatcgtggcaaaagacagctcgcagttgttcatctcggcgatacggttcatttcggccacaacctcgtattcgtacatgcccggacgaagcaccttcattgcggtgatgtgcatgtcagcagtcacgtcgcatgccttttctatttccgctatttcttctgccgacttgtagttgcgctgtgccaccaccgcacggataaacggtacagacccttcctgacgtgccggaggaacacccagccagtccatcagtttcaacttatgctcggcacgataagggggcaaataatggatggtctgtcccttctgtacagccttgtgcagataaccgacgatgtcggcaaaaggacgggtttcggaaattcccacagcagaagccttttcgtgaagggtgggctgggtacccatccagacaatatggtcgatggtcagctcatcgccaaaaatgatttctttatcttcatctatgtcgatgagagctgacagcccggcaaatgacaagccaaaatagtagagaaaagtggaatcctggcggtaacggaaagtattgtcctcatagttcaaaccttgttcatcgttacccaaaaacagtaacactccggagcctatcgtttttttcagctgggccctgcgctgcacatacgtttctttagcaaacataacattccttgttttagtagttataggacaaagatatagataatctttgaaagaagataatacaaaaaggagattaatctatatagttcataatcagaagactattttgccaacgtttttcaagcctttggcaaagttttgccaccgcgttggcaaagtcttgccataggcatggcaaaagtttgccaagctattggcaaaagcttgtttcctcttttcttgttaaatatcatcagagaggtttcgtgttatcgaactattcactatttttgcggtaaatatctgaaagaagatgcacaatgagtgcatagaataatttataaaaatatggcacaaggctcccgacaagtacagacccaagcgcaacagcagatacaaacgctgtcgccgcaacaaattctggtggtaaagctgctggaacttcccgccgtggaactagaggaccgcgtacgtgccgaacttctggaaaatccggcactggaagagggtaaggaggatactcccagcgacgaataccccgacacacccgatgcggaaaccggctcagaagacggtggagacaccagctatgattctttaagcgattatctgaacgaagacgatatccccgactacaagctgcaggagaacaaccgcagcaaaggggagcaggcagaagaaatccctttttccgacgccacctccttctatgaaaccttgcgccagcagctcggcgagcaggacttgactccgcaccagcgcgaactggccgaatatctcatcggctcgctggacgacgatggcctgctgcgcaaatcgctggacagtatcagcgacgaactcgccatctacgccggtatcgacgcttctcccaaagagctggaagaagtattgaagattatacaagacttcgaccccgccggtctgggcgcccgcaccctacaagagtgcctgctcatccagattcgacgtaaggaagcgcaacggcccatgccctcgcctccacaatactatatagaagaagatattcttacccagtgctacgaagagttcacccgcaagcattgggacaagattatgcagaaattaggtatcagcgaagataccctgcaacaagccgttaaggaaatctgcaagctgaatccccgtcccggtgcctcgctcggcgaagccatcggcaagaacatgcagcagattgtgcccgacttcctggtagacacttatgacgacggtaccatcaacgtgacactgaacaaccgcaacgtgccggaactgcgcatgagccgcgacttcaccgagatggtggaagaacacaccaagaaccgggccaaccagtccaaggaatcccgcgaagccatgatgttcctcaaacaaaaaatggatgccgcacaaggtttcatcgacgccgtgaagcaacgccagaatacgctgatgactaccatgcaggccatcatagacctgcaacgtcctttcttcctcgaaggagacgagtcattgctccgccccatgattctgaaagatgttgccgaacgcaccgggttggacatctcgaccatctcccgtgtgagcaacagcaagtatgtacagaccaactacggcatctacccgctgaagttcttcttcaacgacggctacacaaccgaagacggcgaagagatgtctgtacgcgaaatacgcaagatactcaaagagtgcattgacaacgaggacaagaaaaagcctctgaccgatgacgaactgaccgagctgctgaaggagaaaggctatcccatagcccgccgcacggtggcaaagtatcgccaacagatgaatatccccgtggcaagactgagaagatgagagaaaaggatgagcgattagggattaaggtttaaagattagtgcattcaaatagtaaattgtaaatagtcaaatcgtaaataaaattaggttgtggaagagcatattatagcagataaaactttaatcagaacagcgaaagtgatttcggcggtattcacaccgttctccatccctttcctggcttttctggttctgtttatattctcgtacctgcgcatcatgccgttgcagtacaagttgatagtattgggcgtggtgtattgcttcaccatcctgatgcctacactgactatcttcatcttccgcaaaatcaacggtttcagtccggaagaactggtggaacgaaaaaagagatacattccctttattctgaccatcacttcctatgtattctgcctgctcatgatgcaccggctcaatatcccgtggtatatgaccggcatcatactctccgctctggtaatgatgataatctgcgtcattgtcaacttaaaatggaaactgagcgaacacatggcaggcgccggagccgtaattggcggactggtagctttcagtgccttgttcagctacaatcccgtatggtggctatgcctctttatactggtggctggcgtgctgggcaccgcccgcatcatcctacgacaccacaccctgggcgaagttatgggaggctttgccgtagggcttctttgctcgttgctggtactccacccgctgagcaacatattgttccgaatcttccttttttaagagccttgtttaatttttaattttcaacttttaatttacatagtatcaacccttaaaaactaatgatcatgaatttcccgactaatgtaaagtacaccaaagaacacgaatggattcgcctggaaggtgatgtagcctatgtaggtattaccgattacgcacaagagcaactgggcgacattgtgtttgtcgacatcccaaccgaaggtgaaacgttggccgccaacgaagtgttcggcaccattgaagtagtaaaaaccatttcagacctcttcctgcccgtaagcggagaaattctggaacagaacgaagcgcttgctgaccaaccggaactggtaaaccaggacccgtacggcgaaggctggctcatcaaaatcaaacccgccgctgatgccgacttcgacagcctgctggatgccgaagcctacaaagcgctgataaacgaatgaaatgaaaggattagggattagcaccggacggaatgatagcgcagtccctaacccctaatcgttaatccctaacccttataaaattaaccctttaataatttaaagattcatgtctccaatcgttagcatcatcatgggcagcacttccgacctccccgttatggagaaggccgcgcaattgctcaatgacctgcatgtaccgttcgaaatgaacgctctctctgctcaccgcacaccggaagcagtggaggaatttgccaagaatgcccgccaacgcggcattaaagtgattattgccgctgccggtatggctgccgcactgcccggcgtcattgctgccaataccacactgccggtaatcggggttcccgtaaaagggtctgtactcgatggcgtagacgccctctactctatcatccagatgcctccgggcataccggtagccaccgttgccattaatggtgccatgaacgctgccatccttgccgtacagatgctggcactgagcgattcctcattggctgaaacattcgccgcctataaagaagggctgaaaaagaaaatagttaaggcaaatgaggacttgaaggaggtgaagtacgaatacaagactaattgagggattagggataagggattagtaagatgatatgtagtcactgatcccttatcactaatcatttatcactaaacgctaatcacttattaccgtggatttattcaactattcccgacgggaaacatcagaagtaaacattggagccacccctatgggcggctccaatcctatccgcatacaaagtatgacgaacaccgctacgcaggacacagaagccagtgtggcgcaagccaaacgtattgtcgacgccggaggagagtatgtacgcctcacggcccaaggcatcaaagaggctgaaaacctgatgaatatcaacataggcctacgccaggacggatatatggtgccgcttgtggccgacattcacttcaacccgaaggtagcggacgtggcagcacagtatgtagaaaaagtacgcatcaatccgggaaactatgtggatgcagcacgtactttcaaacatttggagtataccgatgaagagtatgcccaggagttgcagaagatacacgaccgctttgtccccttccttaatatctgcaaggagaaccatactgccatccgcatcggcgtgaaccacggttcattatccgaccgcatcatgtcgcgctatggcgatacaccggaaggcatggtggaatcttgtatggagtttctgcgcatctgcgtgcaagagaatttcacggatgtagtcatttccatcaaggcgtccaatacagtggtcatggtaaagacagtgcgcttgctggcagccgtaatggaacaagaaggcatgcgattcccgctgcatctcggtgtaacggaagccggagacggagaagacgggcgcatcaagtcagccctgggcatcggtgccctgctggcagatggtttgggtgacactatccgggtttccctgagtgaagctccggaggcagaaatccccgtagcccgcaaactggtggattacattgtacaacgacacgaccacccctacatccccggagcagatgtaccggaattcaattatctctctcccacccgccgcaagaccggtgccgtacaccatatcggtggagacaatctgcctgtggtcatcgctgcacgcctggacggagatatggacttcaacccgcaattcatgccggactatatctatacggggcgctccatcccccggcaacttccggaaggcatgcaatgcatcatcgatgccgatgtctggatggagcacagtaacggcggaacggaaccggacaatgcctggcccgccttcaaaggagaccagcttcctttcctaagcagctgcggcgcttctttgaaattcctcttcatcacgtacatggggctgaatgacgaagccatcgcctgcctgaagtatcatccggaagtcgtattagtttcacaaagcaatcaccccaaccgattgggagaacaacgcgccctggtacaccaaatgatgaaggaagacctgaaaaacccggtagtattctttgaacactacgcagaaagcgaactggaaaatctgcaaatcaaagcggctgcagacatgggagcacttatcttcgacggtctgtgcgacggtatccttctcttcaaccaaggagaaaccataagcggcaaagtagtggatgccactgctttcggtatcctgcaagccggacgtgtacgtaccagcaagaccgaatacatctcttgtcccggctgcggacgcaccctctacgacctggaaagtaccattgcccgtatcaaggcagccaccggccatctgaaaggactcaagataggaatcatgggatgcattgtcaacggtcccggagaaatggccgatgctgattatggctatgtaggcgccggacgaggcaaaatcagcctctacaagaagaaggagtgcatcgaaaagaacattcccgaagaagaggcggtggaaaagctgatagaactcattagggacaatggcgactatatagagaaataaaagaactataatatggattatcagaaaatactgaaaggtattcatcaagaaatagagccttatgccactattggcaagcaagctgattacattccggcactcgccaaaatcaatccggaccagttcggaatgtgcattcacaccatacaaggcgaaaccttcatgcatggagaagctactaccggcttctccatacaaagtatttcgaaagtattttcccttgccatgtgcctaagccttgaaggagacaatctatggaaaagagtgggtaaagaaccctcgggcactgctttcaactcgctagtgcaactagaggtagaaaaaggtattccccgaaatccatttatcaatgccggcgccattgtgatgaccgacattctattgagccatttaaagcatccaaaagaggaatatatccgttttgtccgttcactcagcagaaacaaccagattgattataatgaagaagtagccctatccgaacgcgaaaacggctacctgaatgcggcaattaccaatctgttgaaatatcatcataacataaacaatgacatagaacgcgtactccgcttctatttcctgcaatgctccatagagatgagctgttatgatttgtctaaggcatttttacctttcgccaaccataaacaagcctttgcgttcgaaaacatcactctgacctcctctcaggtaaaaaggatcaatgccatcatgcaaacatgtggtttttatgacgaagccggagagttctcttatctagtaggccttcctggaaaaagtggtgtaggaggcggcatagctgcagtttatccactgcgttattcagtcgcagtatggagcccaagactgaaccagaaagggaattccgttatgggcatcaaggctttggaactgctgaccacacagacacaggaatctattttctgaaaaatttcagcgtagatatttatcaaagtccacctctttgaacttaaagttatgatgttcggaggggtggtaggctttattccaagtagaataggttttcacatctatctcccttgtcttccggttaaaagttacaatacgtaagtagccttcacctcccaatctactaccttccacaccacgctgatagtttgccagcatctgatacactttatttccctctttccctatagagaccagcgtgccgactccgcttttcaagacatgcccacaaaagacagctatcacattgcgatgtttgagaagcaatttctcccagattccagcaccatcgttcactgtgcgcccagactctttgccgatgccatatccttgagggcgccaccagtctttcccgtcatgcaacgtactgtcacaatacaaataggcgtgtgtattcaatatgacaagcttatccggatgaatacccactatggaatcggcccattgcagagcctcatcagaaggcccgaattccagattcaagaccagccaatcggtatcgcccgacctgaaatttatgaaatagttatccaatgtctttccatctgcactacctccccaatagctcttccgcttatagccggaaagaggaaaatacttgttggccattgcagtgttatgtatgtccgaaaacttaccgggtttactgccaatatcgtgatttccccatacgacagaataaggtattcctgcttggctgacacgatgaaaagctttctgcatatatgcccattccaccggagaattatcttgtgtcaaatctcccacttggaacacggcatctattttcttacggttggcaaccaaccagtccacttgcgaatcgaagacctccggacattgctccagataagtctgcgtatccggcaataccacaaaagtacttacccgaccggaagtggtgcaagaagttaaaaaagcgccccctaaaaagagcgctccgataacagacaatattctcatcattttttcttctgattaaacagccactccataaaatcaggatagttgaaagccggattccaactaccatgattacaaccaggaaattcaatatattccacatcggcaccaatagctttcaaggcccgatatgctgcacgcgatccttcaggagttactacattatccgcatctccatgaaaaatacggaacttgaccgatttgccagccttcaaccgtgccggattcactgttccacaaataggtattgctgccgcaaaaatctccggatagcggacagccatgtcaaatgtacccattcctcccatagaaagtcccataacatagatacggtctttgtctatctgcggcatggccagatagaaatccaacaactctttcaacgtacggaaaataggagaaacaggcacttccaacggcatatctgccggagcaaaagatgaagggcgctccgtatatgcccaatatccggtttcaggacactgcggagccaaaataaacgccggatacttttcgcggtttacaggattaagccacatctgcccaccatgaaccaattgtttctcattatcattgccacgctctccggcaccatgcaggaaaagcaccaaaggatacttttcatcaggtttcatcacctctggacgcaacaaacgatacaacaatgtatctccacgggaagagatataagtttccttttgaaaggtttcttgtgcaaacgaaaacaagaaaaagaataatccacaaaggatgccgattatacgtttcatcttattatttattttacatgtttaacttccgaacgtaaagatacaccattttcattgaaagcctccacacaaaaataataatcctgatcagcagtaagggttttcatcaataaatcagtcttatcatagaccatccaagagctgtaaagtttgtccggtgcaatgccccaaagtatgttgtaaccttgtgcacctttcacagcctcccaacggatggagatgtcacgacggtctgcttggcggtcaagtaccaactttttgggttgttgcggtgccttccccgtacccaatccaaagacgcgaagttcagatatagccagattcggtgtcggtatatctatatttttataacggatataacgggcagacttgggtaatgccagttcaacataatcattcggagtatccctataactttccttacggtccaccaatatatcccaattctcaccatcaagagaaccttcgatgagataacggtgatggagtccttcgtagcgaccgtacatattactttgataatcgtgatagtttatctgaacagcatacacatcagcaggtttctctaaatcaatcatcacccactgccgttcgtcattagcctcggcaagccaaaaagttttagtcagttcatccgttagggcatctgccttaaattcgtcttttgtagtaaaagccgtcaccggcttgccatacgagagcaacatccagccacggaactgtccagccttgcccggtacggcaggtgcataacggggatagtctccgaaacgggtatctacatacataatgccatctttatcaaaccctgccggaaacatacaaaggcgacgttcccaattcacattgatagagagtgacatcgaagcaaaatgccaatactgccccccaggaccaagcacggtacttccatgtccggcaccgttcatataaccacccggcttgtaggacaccggattatgcttttggtaagtataaggccccatcggataatcggccacataaacaccatcggcatagacattgaattccgttcccggagcaccgtattgcatatagtatttcccattatgcttcgtcagccaaggcccctcaatatatccgcccaatacagtatccgtatggttttcaccgaaacgttcccagccatgtttaggcatatccaaattgaagagttctttcgtttctcccttcttgatgaaacgccggttcttgtccagttccattcccctgataggatacacattggaagaaccccagaacatatacgctttaccgtcatcgtcaataaacaaatcgggatcttgcagattatgcaaaattgccggaacagcttcccagtttcctgaagccggattatccgtataaaggatactcatggaaccggaaggatcaccggtcacataaagtaccgaatctttgtaattatgtgccgccggagcattacacccttgcggataccagttcctgcccggacgtacaaactcccagttcagcaaatccctggaacgccaataaccgtgtgaacgggtaacaaacatataatattcaccccggaactccaccacagcaggatcggcaccagaacggtaggagatattcttatccgaattataaatcatgtacgtgtaatcgatatttaaaggattacaataagtatccatatgcatgtcttgtgcagaaaggaaattcgccaaacacaacagcagcaccaaaccacttaatcttttcatcatattatccatatttatattattatactacagccctacctacgtcacaaagtttctacaacaatggtcgtactgattttatcaggagcgtctaaaggtaaagaaaatatatgattgtctcccattttgtctataggtaaagaagttttcttcgcatcaatcaataaataggcccgttttatcccagagccaaaatccgggacaagaagtttgccgtctttcggccaatattgagtaaaaacatgcaaataaagaaactgtttaccgtccacttcttttctggtagctcttccccaatcgagttggctaacaaacggactcggtattgtaccataaatagcttcactgttcaccttcatccaactgccgacttcctccaagcaattgatgctttcagcagggaaagtaccatctgctttcggaccgatattcaatagataattcccccctttactggtaatatcaatcaatttttgaagaacatcctctgtagtcttccagcgtatatcatgggcagcatatccccaattgtcattcaaggtcatacaagtctcccaatctgtaccatctccattggaaggcatatcaggtatgctttgttccggagttttaaaatcacccgtcagcttatcctccattcggtcattaaaaattaaacgttccgtaccaggtatgttcttgatagctttcatcatacgatatttaaattcgggagcgctgcttgctcccatatcccaccaaataagatcaactttataatcatttatgatagtgtgtaaatgagggataactatttcatccgtatattttgctttgtctgcataggaagcttcccgattaggcgcgtcattttgcggaatccatcccatcccccccggattattccagtccaatgcctgcgaataataaaaacctattttcagaccggccttcctcgcttcattcaccagttctttcaatatatccctgcggatatctgtatctttaaaaatagtatgccccacaggtgtatttaaaagtgcaatgccatcatggtgctttgaagtaatgacaatatatttcatccctgcctctttagccatccttacccattctttagcatcgaatttttctgctttgaaatcctcctttgcccgcttcagatactcatccctgggtatttgagccgcaaacattatccattcggcatattgccctcttttataaggtttgcctgtagttgggtctgtctttatactcccatcggaagatacccattcaggacgatagcatgaatagtaatcttttatcatgccgtcagcctctatccaaggatgtttttcatttgtctgcagaaacgtgggtcctgtataatgcccacctaatgcagaataagggccccaatggacaaacatcccaaaacgggcttcacgccaccacgccatccgcttatccttttgcctttttgtctcagcggtagctacataaagtttctcgctctcgcgactgaactctccatgactattcctagccttcactgagaagaagtaaatatcaaacgaattcagcccttccactgtaatgcgattttctttaacagtcttatataaagtatcttccttgtaaacctcataacttacagcctctactacattctcccaaataagttctacgctatttgtacctacacgactagccttcaaatgacaaggtatgcgattggtaaatggatcttgttgagcagacaacattacacagcctactactaaaatgattaataaatagattcttttcattctaaacttcatttatacgtcataataatatgcactattatttgcacagagattcaggaacatcatattcttcctgcaggcgggcaagttccgctttcaattctgcagcaaccttctccatccctttttcaccatacaaattatgcatttctgccgggtcctccttcaaatcataaagttcccacttgtcatccacataaaaatgcatcaatttatagcgctccatcttgacaccgtaatgtgcacggacactatgaaaaccggggaattcataatagtgatagtaaagtgacttcctccagtttcgtggagtattttctccctctaccaaccgacgaaatgacactccctgcatgtcttcaggaatctcaattccacacatatcgagaaaagtgggagcgaaatcaatattttgagttaatcctgttacctgcgttccaggcttaatatgtcccggccagctcattaccatcggcataccgaaagactcctcgtacataaaacgtttatcaaaccaaccgtgctcgcccagatagaacccctggtctgtagtataaacgacaatcgtatttttatccaatccggtacgcttcaaataatccaatatttctcctacactctcgtccacgcttgccacacaagccatataatcctgcaaataacgctgatatttccattctgccacctctttgaaagtacgctgtttcgaataaaattcattgttccgttcacgataggcatccataaaacggcggcgctcatccggctccatcgtaccaagaaaagcatgaggccacgggtcgaatagcagactgtcgctattcatacccgcaaccatcttcaagtcgtgaccttcgtacatatcacggtatatattcatcttctgcatttgtgccgcataacgtccttcgtatgcatcataataattgtcgggtaaagggaactgcgtgtgttcgtacaaatgataatgccgttcggcaggcacccaattacggtgaatggctttgtgatgcatcatcaggaaaaaaggtttattcttatcctcgcgcccactcatccagtcttcacaatattgagtgatgaggtcagttacatatcctttatgccgagtggtatctccctcggtaataaaatacggattataataatctccctgatcattcaaaatcatccaatggtcaaacccggtaggctttgaaacaagatgccacttgccgataatggctgtttcataaccgtttgcttgcaatatcttcggcagtgtctgctgcgaaccgtcaaatcctttatttccattcctcataaaaccattcttatgactatgcttaccagtcagtatggctgcacgactgggaccggaaatggaattgcaacagtaattattctgaaataccgccccttcatgcccaatacggtcaatatggggagtaggagctattttacctatgggatgtccatatatactcattgcttgtcgggcatggtcatcactcatgataaaaataatgttaggacgcctgtttcctattccttgtttctgttcttgtccttgcatccaaaccgaaggaacaaagggcaacaaggcaattccccaggatagtttatttttcatgtattcattatttgttgtaatttatcaaaggcgtaacaccgttttataatttattgattatcagcacagttagaatgcagtgcattcaatatacaactgaaccctattcagtatacgactgaatggcattcactatacgactgaattaggttcagtatacaagtgtttcttgagcccttatgatttgtaaataatgcagaatagaattagacgagtgcctctttacagtttcaaagtaaccaatacgggagcatggtcggaaagatagccattgtccggcttatcgccaactgtgcggtaacgctccacctctacagaagcatttacgaatataaaatctatcagcctgcgcttctccaccggaatacgtccgaagtcatgaaagctccatgtcggtccgtaaacgacctttgccgtggaacaagcgttcctcattccaccttccgtcaatatagtaaccggctcggagtctaccgttccattaaagtctccagtgataactaccggaagctctcccgctatttgctttatcttctcgagtattaacttagcgctttctcgacgtgccacctcacctacatggtcaaagtgggtgttgaaagcagctattttcctgccactcaccttgtctttcaacacagcccaagtcacgatacgttcgcatgccgcatcccaacctttctttccgatggaatcgggagtctcgctcagtccgaaatctccgttcttcaaaagctcaaaacgatctgtcttataaaaaagggagcaatattcggagggcactgaaaaagtcccccatatagtagcgtcctaaaaaaatcggcacatattcaggcaaaagcttgagtatgtgccgatttttttgtaactttatggtagtaatcagacagatatgctaccactacaacagactatacagttcagtaattattcggatctatacgatttgattattcctcgtaacaacctattgcgtcagataaatgatttgatagacttttcttttattaaaaaagaactcgttgacaagtattgtcaagacaatggaaggatggccgaatgtcccatccggatgttcaaatatcttctgttgaaaacaatctatgacatatccgatgtcgatgttgtggaacgatcaagatatgatatgtctttcaaatactttcttgggatgagtccggaggaaacagatttgattaatccgagctcattatgcaagtttcgcaagttgcgtctaaaagataaagatctactggatttgctgattggcaagactgttggcatagctatagaaaagggcataataaagtctcgcacgattatagttgatgccacccataccggctcacgcagcaatccttggtcacccttggagagtctaagattgcgctcgaagcaattgcgcaaaagcatatatgatgccgacgagaccgaaaagagcaatctgccttcgaagaacacggatgacaacattgagcatgagcttgactatacaaaggcattgcttgatgtagttagctcaaatccctcattggcagagatacccaaggtcaaagagcggctgaatatgctcaaggaggtacttgccgatattgaagaccattatatgacatcaaaagatgaagatgcacgggtgggtcacaagagcgaggatgactcgtttttcggctacaagacacatattgccatgagcgatgagcgtataatcactgccgccacagtgacttcgggagagaagggtgatggcccacaacttgaagagctggtaaaccagagccgtgccaacggaatgacggtggaaacagtcgttggagacacagcttattcaggtaaagacaacatcatattatcgaacaatgaagagaatggttttgagctagttgcaagattaaatccagccataagcaatggattccgtaaggatgaggataaatttgatttcaataaagacgctggcatgtttgtttgcccggctggccatatggcaattaggcgcgctgtacaaggaaagaaaggacagggaacgaatcagtcaatggtctatttctttgatgtagataaatgcaagttatgttcaaggcgagagggatgctacaaagaaggcgcaaaatctaaaacatattctgttcaaataaaatcatcagagcatcagcagcatgaggcgtttgagaaatcggaagagttcaggagtaaagcaaaagtgagatataagatagaggccaagaactccgaattaaaaaatgtattagggtatgaccgagcatggtcatacggaatagaatgtatgcgtatgcaaggggctatggttatctttgtagcaaatatcaagagaatcctcaaactcagatgaggggagagccttttcgttctctaaaaagcccttaattggccgtttttaagctttacagggcaagtaaccgctaaattcttagattcaaaagtagaaaaataagttcgccaaatccaattatatggacttggcgaacctttcattttattgcctttagagagcctttttcagtgccctcaatattcgcctttctcttttccatctgcacgacctacgccaagggcagtatattgaggaaggcgctccttcaggtcatcgagttgattctttaccacctcctgcatgcccacaatgtccggagcataataagcaatcatctgtgctgcattatccttacggtatttccagttattcatactgtccgctacatgatccagacggatattaaacgacatcacctccaccttagcttccggttgcttgccgcacgaggcgacaagcaatacgaaagcaaccaatacactattgaaaagcacgtttttcatggttataatcctttttaatctatataaaattcaccaaaatcaaatccagccaaacctaatcagccttattcaaataaggagacgtaaagcctaatctcttcaatcccttctgtacatcgggatgactcatgaaaagcttccaaatcaaaccggtgcgatagttctctatcatcacgataatcggtccctggtcaatggcaagatacgaaggcgcaaaccaatcctcagtcagattaaatgcatccttgaaaccatattcaccccaaagacggtcacccagttcttcatagaaatagcgcatggcctccaaagaatattccggtgcataagggatggatgaaagggccgcagtaggcgtaatcacgccgcgatcatttccgggactatgggcagaatagcctttatcaccgtcactagctgtcaatccccagcatttctcaccgtaacccttatatcccttcggattgtcaatacaataggcacggttaatcaaggtatgagccttcatttgttcctcgtaattggcatagcggtccttcaaaccatgcggatcaagccccatataggagtaatgagtaaagaacaaaggaccgcccttgccgttattgtccccgagaggaagcctgatgccataatactcccgaccgttcagaaaagtattcgcactggcccagcctttatgataaacgctcccagcaatcggataagtaggagaagacgcacccaagatatacacaatgtggcactcattatgacctttaatctggtgattcatcgcccatccgttattgggtgaccaatgccagtacatcacatcctgcccctgagtgaaaaaattccactctgcttggcgccacagattattaatcattcccctgatacggttttccgtcggattatcctttataaaatactgatgggcagccaacaagccttcgaacatgaaagcggattctacaatatccgctccatcgtctttacggctgaaaggaatggtcttaccggttttaccgttcatccaatgtgcccacatgccgtgataactgtcggtattcttgtcgctcaagaaacgaacaatcttcagtatacgttcagcaccttgttcacgggtgataaacccacgttctatgccgacaatgatagccatcactccgaatcccgacccaccaatggtagctgtctcggcaccaccgttactccgttcatgcgccaatccggattcaggatgggcaaaatcccaaaaataacggaaagtttgcttctggacgagggtcataagttcgtcgtcagaaagctacttctgcgttttctgtcccgaaatcaaattaaaaggatatagcaaaagtatcaaatatagcaatattctcatcataatcattcttttagtttaagcacggactctgaaagccaagcttcttcagtccttgttggatttccggtatagacataaataaattccaaaggagacctgttctataattctctatcatacagattatcggcccttggtcaatggctatgtactgagtatcgtaccaatctgccgtcaaattaaaggcatctataaaaccataatccttccaaagtttgtctcccatcttataatagaaaaaatgcagcgcttccattgactcctccggagtataaggaaatgcagacaaagcggctgttggagcaatgacccctttatcattagtaggtgaatgagctgaatatcccgtatcgccgtcacttgccgtcaatccccaacaagaagcgctataacccgtatatcctttaggattttccttacaataattgtaattaatcaatgtatgattacgattttgcatccagtaatcggcatattggtcttccagtccttgcgggttaatgcccagaaaagaatattgagataagaacagcggtccccctttatccgaacctaaaggaagagtgatgccataataagattttccattcctgattcctccatttttagcccagcccgcttcatatacaactttattgatagcatgtgttggagacgaagcagcaagtatataagtaatcagacattcattccatcctcttattgccaggttcttctcaaaaccgtaatcgggactccaatgccaatatagtacatcttcaccatttttctggaaccaagtccagtcaatagcttcccaaagacgggttatgtcggcacgcaacctgctttctacttccatattttccttgaaataggctcgagcggcaagcaaaccttgaaataacaaggaggtttcaaccaaatcggcaccgttgtctttctcactgaaaggtttggttgctcccgttgcgccatttatccaatgtgcataagcaccatgataagccgtacattccttatcaagaaaagtaactatcttctgcacccgttcaacagcttgctgacgggtaataaaaccccgttcagcagctaccagcatggccatcacgccaaagccagtaccaccggtagtaacgacatcgcccgaagtagtacgttcgcgcgccattccggaatattcatgcccaaagtcccagaagtacttgaaggtctgcttctgtaccaatgtcaacaagtcctcatcaggaatacgctcaaacttatcagtatcatccattcctgtcttaatcatacaaaccttgccattggaaagcagtaccccggaggtggacttcacccccggattgacaatcaatttatacgatgacaagattttaaacccctccttaggagtcaccgatacttttttctcttgcaggaactcataatcgcagcttataggaagctcctcatgtttcaaagcaatattgttacgggctgaagcctcatctacagcatccgagaactccaaaacaatggctacattgggagcaacattctcaaatgtctgttggttttgttggtcacccacaatgatattcttcaactcgaaaggctgattcacctcaggttgattatcaccaccgcacgcaaccaacaaaagacatactatgaaatataatactttcatcttagcatcagattaaagtgtagcttcattcttttccagagtaaatactctgaatttcggttgccgtcaacaccttgtcatataagcggaactgatcaagctgaccgggaaagttctttgcccaggtttgtgctcctgcacccgaagtaagactcggagtagtgctgaactgaaatgcaccaacagccaaagaagcgcctacattattaaacttcaatttcccacaatcaggcaattctttggtaaagaccccctcaccattacgataaacagtaatggtagaagtattgccatcatacacaaaagccagatgcacccattcgctaccaaaaatatcatctatttttgcctcaacccatctttcatcattctcttttgctgtctgattgaagatatgaaccttgaaaaatgcctgagtctcgctattattattctccaagaagatgtcgaagttgccccagaatttaatagagttagggatagagaacaaaccttgcgcagaagtattcttagtggttctcatccaaaaagctacagtcaaatcaccgatagtgggtatgttattttccaaaatagaaggagtcttggccaaaatgtaagcattttcagcaccttgataggccatgccagcgattccgtcttccacaaacttggcattcccgttatctgctaccaaaaatccccattcacctttatcccgaatgtcctcttcatcaaaaggaagatacatcttcaaaggagtagtaggtacttcaccggtactctcagggtagtcgaaagcaggatgatccatatcctgaaaacaagactgcatacacaatgcaaacaggcaagaagccacagatactatatattttttcataagtagttagtacatttatagattaataattgggattttgaaccaatacaccattcgacttgtcaatttcgtcttgcgggatgggcaacaaagcatgtctgtcttgataaccggtcttgcctgcagcatgaagtacctctttagcaataccccaacgaaccaagtcgtagaaacggtcgaactccatacctaactcaacacgtctttcatgacgaatggcctcacgcagttcattctgattgttggtcgtcacttccggtaggattccgatattattgccacgagcacgagcgcgcaccatctccaaatagttacgggcagaagataaatcacccaattcacaagcagcttcggaagccattaataccacatcagcataacgtatcaaacgaatattcacccaataacctccttttgtgaatttcaaacgcattgccggatctgtatatacttttttgttaaagtatttagctataacatcggcattcgaaactggtttctcgccataaggcttgttagcaggtatggactccggatcgtccttgccgttgcgtataaaataaagcagggtttcgtcttttctcggatcaccttcttcaaaagcatctgccaattcttgagtagcggtgtgttgcccccaaccgagattccactcgcctgcgccacgtacaccctgaacggaagcaaactggcttcctatatcattagaacctggttgtgattctgttgccgtacattgcaattcaaaaacagattcactacagttttcacctttttcccggaatatgtcttcataaggtgttttcagattatataaaccggagttaatcacttcttcagcggcagccttcatattcccccagtcattacgcatcatgtatgtgcgtgcatgaagagaacgagcagctccccaagtgagacgacctacataaagttgctcccacgttctgggcagactgttttcggcttccgtaaggtcagaatctattaattcatatatctttgccacagaagactttggaacatttgcctcagctgcatcataaactttaaagtcaatcaaaggcacttcaccaaaagcgcgtacaaggttaaaataacagaaagcacgtacaaacaaagcttcccccttattgacgaggtcaccttctgtcaatgacgggttttggctcatttcatcaagcaaatcatttaccttatgtatcaatgaatagttttcattccagtagctcttaatcatcccattacttgccaaatattcaaagtcatcgaacatcttgccagtggctgctccatcggacaatgtgcttcctttctctgcgtcctcagaacgcataccgtggattgccaatgcagtattgccgcttgtcaaatgaaaaccgcgcaacttggcatacatattaaacacctgcgtttcataagtaccaccagtcaaatcatcctctgtctgctgtccaagcggttttctatcaaacatatcctcacacgaagttagtgcaaagcttactgctaaaaatgctatataataaaatatcttcttcatagtctgcctttatataattttagaaagtcaaattaaaaccaatcgtataaactgtaggcataggatagcctccaccatcaataccaaacgaaatagcacttccgcccacttccggcgtatatccgccgttacggctccaggtcttgggattctgcacattggtataaagacgcagtgactgtaccttgatacgattcaacagtcgtttgtcaaagttatatcccaattcgatattacggattctgaagaaactgccatcttcgatgaaatacgtggaagcctcctgatttattttgtgtgaagggtcgagcaagggctcccaattggaagtgccctctccatgccaacgattcaattgctctgtgcgataattcagttgtgcatagctactgcttccccaattacggtaaatttcatttccataaacacccatcatgtcaacagtcaggtccagattcttccatcccaaattaacattaaaaccgtaagtaaaatcaggagttggattacctatcattgtacggtcattatcagtaattttgccattaccgtcaacatcagcaaatttcaaatcacccggtgttaccgaaccaaccgagttaatcggagagaaacggatgtcgtcttcgttctgatatacaccctcaaccttgtaaccatagaaatagccaatcggataaccttcggaaacacgtgagggaccactgataatattatagtctttgtttaccagtgaaagcaccttgttatcaatagtgctcaaattagcacctaatccatatctccaatcttccccaatcttgtcgttccaagaagcactaagttcaaaaccgcgattgcgaatctcacccacattctgtaatccgggaacagtacctgcaatacccggaatggaagtcaacatatcttttgttgttttgttataataaaccggagaaagctgcaaacgatcattgaacatatgcatgtcaaaacctacttcccatgaataattacgttcccatcccaaagtaggtgaaatcagtttgttggggcctttacccgcaatgatattgtcaccgaacacagctgaacccgaactaacaatggtggcgtatgccggataactggaaccggtattctggctgcccaacacaccccaagagcctttcaacttcaagaagttaattacattttggttctgcataaacttctcttcggtcattacccaaccggcaccgaaagagtaaaagttgtcccaagtattacctgtcttatagaaaacagatgaaccgtccctacggaaagaagcattaagtaaataacgattcttgtagttatacaatgctctgaacaaataagacatggtaaatctgtcactctgagaaccgccattagttgccgtagatacatcgtcgatggtagagagccaccatctgtccgggtcgtcgcccaccaaaatgccgtagcccgcaagctggctgcgtccaccactcaaactggaagactcattgtaattggtggtaagaccggcagtcaatgtcaatccatgattaccaaactgtccgagataagtcaacacatagtcagactgtgcagcaagagaggtagacttgctttggttcacactttctctttcagtcaaccgttcttcccccccctccacatcgggattataaacataaatcagcggagaatatgaacgtccctggctagaagcatagtccatagagaaagtcgctttgaacgtaaggttctttagaatatctatctctccgaacacattacctgccacgcgatagttttcagacttgttgtgagcaccgcgcaactctgtttcaataagaggattccacacttgtgcacgctggaagtcgggcagcgtatgtatcagtcccgattcaaggtcatgagtaggagcaataggagcagccttcaaagcaccatccacaccctttgcatcaggatacttagcacgaactccattaagttggaaaccaaaacgcaggaaatcggttacactatattcactgttcaagtttacggtaaacttattgagcttttccgttttaatggaaccttcttccatgacgtaacccaaacccaaataaaacttgctcttatccgttgcacctgtaatgctcacattgttattggtcagaaaacctgtctggaatatctcatcctgccaatctgtgttaccagtccattgagtataatcataagggtcgcttccttgagatatcaactgctcgttgtacagcatcttaaactcttcggcattcgtcacacctacacggtcataaataaccttccaacccactgaggagttgatgttgaccatcgtcttccctatttttgcccttttagtggtaatgatgattacaccattggcaccacgcacaccgaaaatagccaaagaagaagggtctttcaagatttccatagattcaatatccgcagtgttcagataattgatattgtccgtgaacagtccatctaccacataaaggggtttgaaaccgttaatggagttcgtaccgcgaacacggatttcagggtcttgtcctgcacggcccgtattcactacctgtacaccggcaaccttaccctgtatggatgccagtggattggtagaaggcttagaggcaatctcatccgctttcacagtaacgatagaaccggtcaagtcgcgtttcttggcactaccataaccaactacaaccacctcatcaatgagctggctgtcctcttccatcttcacattgatagttgaacgcccatttacggcaatctcctgctcacgcatacctatataactaaaaatcaaggtagcattagatgccacatcaacaatctgatatttaccatttatatcagtaatactacctttactctcctgcccttttacacgaacagaagcgccgataacagtttcgcctgtcttgtccgtaacgacacccgaaatcgtaattttgttctgtgccatcgaagtaatggcaaacaataacatcacacatgtaattagtagatttttcttcattttgtattgatttaaaattcttttgcaaacataccggagaagttgatatatgtcaaaaaacaagctaccacaagagtaccacagttcaccggaggggtacatcattgctactactgcataacataaacaacagattataaggaatataaaagtataataaatatttaggtactattcatataatagagcaagaagatagaaaagcaaagggggcttttatcctattctgaagttttttatcccatattcaagaacgtcatacctttcactgcctcaaagccgaccataagatttccataaccgattgccattatacgatagattatatatcaagtaaaaactgcaaaacgtttgcagtgaagatgtagacaatatgcagcaacaatgccatctcaacgcagtggcttgaatgctgcatattgccgtcttgagaatcagttagagtaacttgaacgctgctttctttacgtcctggctatttctgccaatcatcacctcaaaatcaccggactcgcatacaaaatcaagattgtagttgtagaacttcagcaattcgggagtaatcttgaaagatacttttttagattcgccggctttcagaaaaatcttctcaaagcctttcaactctttcaccggacgggttacacttcccacaaggtcacgaatataaagttgaaccacttccgcaccgtctctcttgccggtattggtcacagtcacggtagcagtcagttcgcccttatccgtcatgctagtcttgtccaaagccacgtcgctataagagaatgtggtatagctcaagccgaaaccaaaaggataaagcggttcattgtctatgtctatatagttgctgcggaatttctggaaccatgcaccgtcggcaagagggcgtcccgtgttcttgtggttgtagaacaaaggaatctgtcccacgttcttcgggaaagtcgtagtcagcttcccactcggattcacatcaccaaacagtacatcaccgatggcaaaacctgcctcactgcctgcaaaccatacattcagaatggccggcacgtttgcctgctcccagttcagtaccagcggacgaccggtaaacagcaccagtaccactggttttcctgttttcaataattcttgtaacagcatgcgttgggtgtcggtcatttcaagattcgtgcggcaactgctctctccactcatttccgaagactcaccgagcgcagccacaataacatccgatttggcagccacagcaagagcctcgtccagcaactccttgtccgaacgattgtcacggtgtaaagaacgtccgaacatagtggcacgtttctcatattcggcatcactcatcaaattacagcctttcgcagtcaatatttcggctttatcgcctgctaccgccttcaaaccttcagccaaagaagttgcattcttcaatacagcagccacactccaagtacccggcatattactgcggctgtctgccaacggacctaccacagcaatagtgccttttttggccagcggaagcacattaccctcgttcttcagcaacaccaaactctccgaagcaatcttacgcgcaacggcacgatgctctttggtaaagatttgcttcttggcacgcttcacatcacagtatttataaggattatcgaacaagcccaacttgtacttagcttccagaatacggcgacaagccgcattaattacttcttctgtcacttttccttctgtcaatgacttcttgagcgtacctacaaatgcatcgctcaccatatccatatccacacctgcattcagtgccaacgcggcaacagtctgcgtatcgcccatgccatggtcggtcatttctgtaattccggtataatctgtcactacaaaaccgccaaacccccactgcttacgcaatacatccgtcatcaaccacttgtttccagtagcgggaatgccatcgacctcattgaaagaggccatcgcacttcccacaccggcatcaaccgccgcttgatagggtaacatgtattcattgaacatgcgctgatgactcatatctactgtattatagtcacgtcctgcctcaccggcaccatacaaggcaaaatgctttacacaagccataatctcatcattacggctcatatcttttccctgataaccacgtaccatggcctgcgcaatggctgctcccagaaacgggtcttcaccgttgccctcggacacacgcccccaacgggcatcacggcaaatatccaccatcggactgaatgtccagcaaataccgtcggcactggactcaatggctgcaatacgtgccgattcttcaatcgccttcatatcccatgtacacgacaatcccaaagggatgggaaacaccgtttcatatccatgaataacatccataccaaataagagaggaatacccaaacgactttcttcaaccgcctgcttctgtacatcgcggatacgttccacgcctttcagattgaaaagcccgcccacttcaccggcacgaatacgtttggccacattactacttttagcctgaccggtcgtaatctcaccggtaaccggcagattcaactgacctattttctcttccagggtcatcttcttcattaaatcgtcgatgaaacgattcatatcgaccggagatttctgcgcatacgcactaacggcagtaaacaccaacaagactaaaaatgattgtaacttgaaaagtaaatacttcatgtctttcatgcttttaatttatagaaatattattttgctgcaaataaaagaaaagcatacgacaacctccacatcccgcactacaacaaaagtacacccatcactaaaaaacaaaagagggagtacaatattaatacttcccccattaatattccactgtaaaacagttatttaaaatttataaggaaatcagtcagactttcttccggaagcagattgaatttcttgcgcaaccggtatcttgcagcatcaaccccacgtgtagaaatgttgagcaacttcgctatctcctttgtcggcatattcaagcggagcaatgcacaaaagcgtaaatctcctgaagtcaaatcagtatattgaagtttcaggtttcggaagaaattttcatgtatacggtcaaaattagcttgaaacattatccagttctcttcatcagacactatattattgttgaccaaaacaagaagtttatccaaattcttacgactatgctgtccggacaacttttgcttctgtatctcctctttcaatgaagtcaaaaactcctgatgagcgatattcatcattaccacgctggacaattctttacttttaaaacgcaaatcggcctcaagctgctccttttccaactcaataatcttcttctcttgccgttcaagctctgcctgatggactacacgctgctgctcaatcacacggtccttctttttcttcacaaagcgataaacaatatattgcagcaaggccagcaggcacaaccctatcagaatgtagcttcccacagcccaataagacaaataccacggagacaaaatctcaaagggaaactccaccgatgccaaaactctaccagtatcatatatctccgcccgaaaaacataacttccataaggaagacgggcatactttttctgcaaattgcgtccatcaggtatccactgatcagaatacccttccaaccggtatcttactttataagtataatcgttataaaccggatagcacaatgtaaaactcactgtattaaactcatgttcgaccttgactcccgactgcacgaccaatgtcttccgtttatcactgaattcctcagtaacctgcatctctgaaatccataaagaacgcctggtctgagatttatataacgaggaactatctgtttcaatacgggcaatggcattattcaagcaaagataggaatgattatttctcttgtcataaaccacgcttcctcgttcttccacagccagaccgtcaaacaaagaatatggaatccgaagttcgatattgaaagtatttatcgcacacttcaccaaaaacacagtcctgtcgcccacaaaccaatagtaatctccgttcgcatgactcacagtcttgattcctttcaattccatcaattgctcattcattgtttcataaggaacaatcgaatcagtcatatcttcgtaagtatagaaatattccccattagaaaaaactacccgaccattgattttgaacaaagtaaaactcccacctttcacttctcccaagctctcatacttccgcacatcctttacctgcttcatatccgaatcaatccgaaagcgatacaaaccattccttaaatgtttcgcccaaatattcccttgatggtccacttctatatgacgaatcatgtggctgaacccacgtaaggaccgagtaaagcaatactctcccgaagcagtctccgtatataaattcagaagcgcataagctccctccaacaaaaaagattgttccttcaattcaatcttttccatacacatccctccttttacatcagataccagctttgatttcagtcctgatataaagaaagtccccttgttgtgcccgcagaaaatctgttttccccattcatcgacgaaccacgcttgttcttccaaacccggaactaattcagtctttccatccttaagccaataaagtccctgattagaagcaatataagcttcattttcccttaccaagacatcatataccatgcctattttacgaaatggaggttcataataatagattaaagaattgttgtgtatataggcaataccttcatccaaagctgtccatatattgttgtcatcatcacaatacaatctcaaaacagtattgttctgtagtttattatccgtattgaccttccaaatcagctttccctttttatccaacgcatatatgccatcagatattgtgccaacaacgtagcaactgtctttggtcatcaccgcacgattaatggtatgcttcctgaatatatcatcacattcagtttcccatttttctaccctcccatctcgatacaggaaacctccctgattacgggtaaacattaaaaccgcatcatcataagggagcccggccaggacatcactatctccaaatgcttttctgggaataagttctttcatttccctaccggcaaagacataaagtccgccgtttattctttgagaataaaaagtatttccaacctggaacaaattcagtggaaggttcttcattcgaataccttctaccgaatttccattataaaaaaagagagaaccgaatgattgaaatacaatttctccttgaacgcaagcaatatcccagatttcgtcattatgaaacacaaaatctttcaccttatttttcaatgaatgatattgaagagtgtcataaggagtacggacaaaataaccgaattcttcgtaagagcctacataaattcttccatcttcactgatatatatagcacgcacaattccttttgtcggtaattcatacagccgccaagcacttccatcaaattccaacagcccactgttattaccgaaatacatcactcctctttcgtcctgagcaatggcccaattctgaataccagcattataatccgacactgaatagctcctcactataggagaaaaaggtatgggtgaagcttgcagcaaactactgaaaaccaaaaacaagagaaacgttattgcaattctcatgagtactgtttataggtatttaccagcaaagataaagctttttgcgttttcgtaaaaacaaaatcgcagattatcctcttttatagaaagataacccacgacaactgacaactcactttataagatttcagcagctttctgttttcccaaaggaatagaaacacccaaataagcattgacattcttcgtattcttgccaaagaacatatagtctgttcccgcaaagaaaggccccagtttcagtgccagaccgaaggttttaccggctccttgaagtacggaatagctggcagctacattgaaagcattcgtcggacggatgcaggcagagaaagtcagctcattcaaagttttcggcttggcaaaacgaccggtatacaaggcacccactaccagccaatcattcagcaaggcatattcagcgccaagaaccattgtagaagtcaatccacgggtacggctcttctcagaagcttcctctgtcttgagctgcaacatgtcatagttaagaatctcgccgctgttcacaatatttatgaactcctgctgcgaggccgggtcaagaagatcataagtctgctctgcattggctcgcgctatactggtattcgatttagaccatttgataaagcccaaatcaagaactgaagcagaaagtgtcaatttatccagtaacttgtaagatattcccaaatcaatagccccaccatatccggcaaaaccgaaactgccaaaatcgatttcatcgatataatcaccattctcgttctcgggaagttctaacagctttgacgagttctccaaagttgcatccacttgaatggaagctttactcgtcactcctgaagagcccacagaaggagtttccacatgaatctggttaatgttcagctttaagttaccgatacccagcagcatcttcaccttaccgcctacagccagtcggtctgttatattccttgcaaagccaacgccgacttctgcataggaatttatctcaagcttctgtccattaatggtttcgttaatgcccaaatagtcagaaatattgtcaccaaactccaggttactcatgttattcataaactggaacatggttttcggtatggcagcaccgatatcattacgcaaccccacattgactgaccagaagttctttcctttataccacccggcagacagaatgtcggtactcaaattcacattcaagttattgatagcatccagtcggttcataaagtcattgctcatgaaatagtcgctatcatcactgttctcaataatgtccataatatccctataccccagggaactggagttgacggtagcattcaacgaacctatcgcgggaatattcagataaccgcgtcccggcatcaaggccggattgagctgcatacgctggctacttccttccataaagtaggaagtgcgcagaaactgggcttgtccggaaagagagaagcaaagcaacaataccacagacagccatactttcagagaattcaatcgtttcataaccttgtcaatattttcattatcacctgcaaaaatataaaacaagttaataccctacaaacaacttaaccgaatagccgtgtataaaaggcttatacagagactatccggtataaattaaggagcaaataaaagaatcctcttaagaatgcccttatactatttcatcataaacattctcatttgctctcgtagcggtactcagaaaaaccggggctgcctcctttctttattgcagagacattgacgtcactgtcggagcactcaacatttccttgtattttgccggagcagtcagtatctttacagcctctttcaagtcatcatcatctttcaactgctggataatgcttccacgctggaaataataacgcttgatgatttctaccgcaatcatgctcttgatgtccttggagaaatggtcaaggtcacggtccagattatgcgacaattttttctccagcgcttcaaactctttcgaagcatcagtcagatagccctcaaattcggccatctccttcaggttcttcagcatcttctctgtctgttggtcgtatttgaagtccgccttcttcaccatcgccttgaagtccgcataatcggcatctgtaatttcaaacttctctgctgaagggatggtaggatgtttcaggcaatagtccgttgcataattgaaaataagattgtcattgacaagatagaacagaatgttgggcagcttctcctgcttcaccgcaatgtccggagtcacgcctccgccatcacgcacttcacgtccggcagccgtatggaacacggtagtaaggctgtccggaatacgtcccacactgccgtcctcattccggtgcttgtagtcgatagcctgcacacaacggccgctgggaatataatatttagaagtcgtcagcttcatggtaccaccgtatggcaacggacgggtggtctgcaccaatcccttaccgaaagtacggttaccgataatgaccgcacggtcaaggtcctgcaaagaacccgcaaggatttctgacgaggaagccgttccgccattgaccagaacagccaaaggaatttccaaatccaacggttcacgcaatgtcttgtaggtattgctggcttgcttaatcttaccctttgtcgtcacaagtgtttttccgcgaggcagaaagaaattggctatctctatggactcatccagcaagccacccccattgttccgcaagtcaatcaccaacgaagtcatcccccgcttcttcaagtccagaaaagcctgcttgaactccttggaaggattccccgagaaggtgctgagattgatataacctatattattatccagcaccgtataataaggtatgaacggcaattggatggaacggcgcacaatgtcgaaatccaacggtttctctgtaccgggacgttgcactttcagcttgaagctggtacccacttgtccgcgaagcatctcgctgacttcctggttgttctttccggcaaggtcttttccgtcaatttccatcaaaatatctccggctttcaggcctacatcggcagcaggcatattctcgtatggctcagatatcatggaacgtttcagtttcggattccaagtaatcacagaacctataccaccataggaattcttcagcatctgctccaattcgctttggtcatcttccggataatactccgtgtagggatccagcgagtagagcatggcatcaatgccttcacggatagtcttgttcggatcaatcgtatccacgtagaacatatccaactctttcacaatggaattgaatatatccagattctttgctatttggaaactgcggctatcaccactcttaaacccccaaaaacaaacggctcccgctacaatcagcaaggtaaccatccagcgtatctttaaaattcttctcataatatgtctatgtgataatatgctaattaattaataaaatttcttccttgattttttcccattgtgctgcctgaagctccgtacccaccacttgtatcacatctttagagagaagggagcctatcttgccacatttctccagcgaatagccacacgtcagtccatacaagaaacctgctgcaaaatagtcgcccgctcctgtagtgtccaccactttctctaccggagccgcttgtacctgcaccatctctgtacctttacgaatcagagaaccacgggcacccacctttacaatggctatgctacacattttggcaatgatgtccaatgcttcctccggttccttacctgtaaaggcctttgcctcttcttcattggcaaaaacaatatccacatatttgttgaccaacagagagaaaaattcaaggtctccttctactatattgtagctcgccatgtccaaacatacttgtaaaccggcctctttagccagctcaatggcacggagaatcatatcatggtcttgcaccagatacccctctataaacaaataagcatatcctttgaacatatccagcgaaagatcttccgccttcaatgtagaagccgcccccaaataagtgccgaaagtacgctctccatcaggagaaatgaacgtagaggctacaccggacggaagggtagtggaaagcaataaatccgcctctgtcccatgttccagcagactatcccgaaaaaagttaccgtaaaaatcattgtttacttttccgataaatcccgtacctgcaccaaggcatgccattgcccgaatcgcatttccggcagaacctccgttagccagatgtgtctttatccggctgaaatattcactaattttcaagaacttatcttcatcaatcagagtcatacttcctttcgggagctgcatctccgtcaaaatattatcatcctcaatgattgccagtgcatcaaccaaagcattgcccaacccaattattttatccatcttcgatattttttttgcaaagatattgcatatttcaaaatatcctattacttttgcagcgcatttgagaaaaaacaacattcttccttagctcagtcggttagagcatctgactgttaatcagagggtccttggttcaagtccaagaggaagagcgaaaaaacttgaatgcatattcttccttagctcagtcggttagagcatctgactgttaatcagagggtccttggttcaagtccaagaggaagagcgaaaaggttcgtcaatcaggcgaaccttttttgttttcccacattatcccacacaaaagacaaacacttctatttcattttcaaagatttaacatacatttgccaaatgtaaagtaaggaatttcataaaagcacctgtctttatttattagaaagacatatcttaatccaagcaccaaactacaatgaaaactcttttattctttttagtcataggattcaacctatgtaccgcaggtaaagcacaaacctctcttgtttctgcgcgggaaaaattccgccaccatgaaatatccgtcagttacggcttcctccccattaccgatgctaatagtatagccgaagagtttattgctccgacagcaagttttggaatctatacacgcgagaagaccagctattacggcgctctgaacatcagttatatttatagattcaaccgcaaaatcagcctgggcgtaaccggaggaataaccggtaatagaggaacggccagtagcctttatgaagttttggatgaaaacaccaaagacaaccgaaggtatctgtatgttcttcccaccttccggtggcactggtttacccgccccaaattctctctgtatacctcagcagggctcggtgcctatttcctccggaacagttttggaggagaagtctttcacaagacaaaattctcttatcaattcagtttcctaggcatcgaatacggaagccggtttgccttcttcacagaattcggagtaggatataccggaacaatcgtagcaggcggccgttatcgtttctgacttatgaggccgccaccgccagtgtcaatacactgatgcgcacgccctccacttccttgagcgcatcggcacaagccgtagtggtggcaccggtagtcaatacgtcatctataatcagtacatgcttccctgcaaaagcatcagcacgacgcagacagaagataccgtccacattctcccaccgttcataagaggatttacgggtctgcgtttccgtatgcttcatacgggcaacggaagcagtatctacgggaataccggtgacagcggaaatgccgcgagctatacattcgctctgattgtacccgcgcattttctgcttacgcggatgcagaggaacggggacaatgacatccacatcaccgaagaaaccggcagtcgacaactccgccgccataaaccgccccatcacttcgccaaggtctttcctccctccatatttcaactgatggagaatgcggcggaaatcactccctttatggtaaaagaaacaagatgtggcatattccagaggtatcttcccccaaaacatacgttccaccggattgtccttacgaagatgatagtttgtccggggcatatccatattgcacttcatgcagatgccctcttcaccctcttgcaagatagcaccacacacggcacactgacgcggaaagaagagatggacaaaagaaaagaaccaggttttaactatgtttttcatcgtatagtattaaaaaaacggcaacagagcaatacactccatcgccttgtttgctataatggcgagacctcacctgccagcttcaagaacaacggatgcagcggtccgttagtggcaatgatatgatgtccgtccaaaaaggcgtcactaccgcaaaagtcagtgactcttccaccagcctccagcaccatcagcgcagccgcagaaaagtcccatttgccgataaacgcctcaagccaggcatcaaaacgtccggcagccacatagcagatggcaagcgcagcggaaccggtcatgcggatgcctgccacacgcccgtaaagttcatgaatcaaatgctcaccggtacgtgcataccggtcggaattataaggaagttccgtcactacaaaggcatcctccacctgctggacagacgagacctccatccgttctccattcacataagcgccacctccctgccaggcataaaaacattcatcccggcaagggtcataaacaactcccagcagcagagaatctttgtcgcgcaaagcgatgctgacacaatagggggcattatcatgaatataattcgttgtcccatccaacgggtccactacccaacagtagggttcatcgtgatagacagcagaaccttcctcagctataaatccagcctcgggaagaagctcccgaagcgcagccaccacccgtctctccgactccttgtctacataagagacataatcatgggcttgtttcttctgtaccgcttcccggctgaagtttttccgctcttctttcaagaaatatccggcttcacgggctatgcagcagacagactctgtcaatatcttcaaatcctccatttctctacatattagttccccgcagcctcttctgcctgccggtaaataagccgaccgcgctggctgaccgtccatcttccatcttccaaacgcacattctttgtatcatcatcttccacattccaagcatatccccccgaaggaagaccacggcgctccagaatctcgttcggcatttcctcttccgaaaagaacagttccacttgagtagaatcgggactgaacaccagaaacaacaccttctccgcatcatccacagcgttcatacggactcctttttcccacagacggatacagtctttctgagcctcactccaggtatatccggcagatgcaatgcaaccatgcttatccttatcaccaccaacgacatgtaccgtatcggcttgttcagcaacttccacagtctttcccctcttgctaccacaagccacaaacagcgctccggcacatagcaagcatatagatattcctcttacattcatcttttctctttttaattgctttttgcttgacaaagttaagaacaaatcggcaatttaaaaagtttcttttccattatcatcagtgctccggcagtatattccaagactttgcaaaagataaatccacaaacaagaatctattcaagttctatactataactttatcgcacattctacttgcatgcttgcatagacacatatagcaacctactgcacagagcattaagttatgtaagcaaccaccatgcaagtatgtaagcagattttgcttacataaccgtgtcctcttacaaaaaagcaggcttctcttatacaagaagcaggtcctccttgcacagagaagagtagagcagaaaagtttgtcacacttaacatcatattacagccacataaccggaaaatatgcataatagtacagttcccacatttcttgcttttgaattcattaacaagttctataactttgaacggctaagactctgcccaatcatatgttttcacagtgaaataagaggcaagtatcagcaacaattagacagacatatagattcatgcaaagcagcattcacactttatcttgtggaactatactccatggccattcctacaactaccaaattaaaggtgtattaggtcatggagcattcggtataacctatttggcttcaatttgcctgaaaggcgaattaggcatcttgaatagcaatgtatccgtagccatcaaagaattttttctacaagatgtaagtgccagaagttcatcaggagatatttatgagccatctcccaatagcattgcatacaaatatggaaagaaatttcaaaaagaggccttaaacctagctcgcctcaaccatcaaaacatcgttaaggttttagagtcttttgaagagaacaacacctactactatgtaatggagtatatcgaagggagcagtctggatgcatatatattggagaaaggagggctgccggaaaaagaagcgctacaatatgtagaggagataggaaaagcattgcaatatatgcattcccaaaagatgctgcaccttgacttaaagcctaaaaatatcatgcgacgtacagataacactttgtttctgatagattttgggctatccaaacaaatcgacaaaaacggagaaccggaatcaagcactactattggccttggtactcccggttatgcccccttagagcaaggttcgcaagaatatgggaaaatactcgcacccacattggatatctacgctttaggggccactctctttaaaatgctgacaggaaagaccccgcccaaagcctctgaaatactaaatgaaggatttgcagaagaagagctgcggcaaaagcacataagcgcgcaaacaatatcggccataaaaaaagcaatggcccccatgaggataaagcgccctcaaacagtaaatgagttcgtggctttaacccatagcactacgaactcccatactgatgaaagtaccaaacacacttcctacaataagcagcatgccacatatcaaggcattgccttttattacgtccaagacgacaaactggtttattttctgaatgacaatatttatgaactgcccctggaaggaaaaacacaggtagaagagataatagaaaagcctataaatccggtaattgtacatttcaacacctcactggatgcattcatcaagaaaaatcgccagtctatacaagacagccgtttcaaggtcataacatataggaaaagtctgtgccattattttgatgtattaagatttatcaacaagtactttgacaacgataaaacatcaaagatacgggttactgaagaaatccatatcgcctcagcggtaccttgcatcatccattcaaatgacatgcctatctgcatctgctccaaagaggaatactgcattgccgaatacggagaaggcctttatgaggccgaatactccggagtgggaactgctgaagagcacatcttacaagaatatgatgtaacatctcccgccatacctatgaccgatttagaactatactggaaattcttgcctaaagccctatctatatggtattcatctgttattggccagataagttcatttgccttccttgattgtctgccttttaaagtattggcggggtatacactagagaatcatgtcagagaatgctcttttttatgcaatttctgcagcttccctttaaggcgcagcgccacatttcccggagacggtgactcctactttatggaaatagacagtagacgttttatcattccgctaaaggattatttaggatattctcctgaaacaatagaaatcaccatcgatataagttactttttatgtgacatcattatcgaagatgtaaagtacaaaaagcgagtaaaaattcctctaatcggattaatatcaaacagctatacagaagaggatacattaaaaacaaataataaataagttacaatggatacgacaaccaacttcttgtttttcaattcacgcgatgagcttcttagattggacatttccaagattgtatattttgagtctgatggaaattacaccaatataatacttacgaacaagctacgcggtattatttgcttgaatttagcccagaccgaaaaagtccttgaagagcgactgaaagaaaaagcacgctgctttgcccgtatcggcaaacggttcatcattaatctgaactatgtttaccagataaatgtcatcaaacagcgactcgttttaagtgactattcatcatttgcatttcaactggagatgtccaaagaagccctgaaaaaactgaaagaaatatttctcaatataaaattcgcataataaaaacaataatgccatggaacttatcataggaagagaagccggtgcatcccgcctgcgtatcagcataaacaaccaagaccgtttttgggggaatgccaacagcgtacccaaatccgtcagccgccagcactgtaaagtggtgaccgatgacaaaggaggctatatcattaccaatctgaaacccgaaaacgtcacttacgtcaatggtgtgcaaatcgagtccaagcacatttccggaaaagaccgcatagagctggggtcagaccgttacttcatggatatagcggccattataaaagggctgggagcatcaatacccaaatcgttctctatccatcacctacaagaagtatgggacgaatttcacgacaccaaactccagatacagataaaagaaaagaagtctgcagcaatccgttctgtaacaggcgtattttccatgtctgccattttctgcggatttattccgggcattgccgacctgccggttttgcgtgtcattctatattctgcaggacttttattggccatctatttctttgtgataacctaccggtcatcttccacacttcccaggtttctggacgaccttgataagaaatttcataaggactatgtatgccccaacccggaatgccatcatttcatgggatatcaacagtatgacgacctgaaaaagatgacgagctgcccctattgtaaatccaaatttaccgagaagtaagaatcccttgaaaaatgagggattgataccttaaaccgcagggtttatgtagtatactttttgaaatttgccattgcatgcctctctttatatttttgttgcagaataagttataaaccattaaaaatgagcaactatgaagactaaaaaaacaaaccaggaaagcacaaattccacacagaaaaatgtggaacagaaaagttacaattggcaaaatggcgccagttcatccatcggagctgcaataggcgtagcggccggttcaatggcccagacagcttttgcaacagagccagtcaccgaaggaccggtacagcctccccacactgatacccctacagtaacttcggaagtacctttaaccaatgagccaattgcccctcagaagcctgatacccctgccacacctatcatgcccggaaacagcaacgatgaaccgcataacgaagataccatcagtgtggtctcctatgaaacggttacgtgcgaagacggctcgcaaatggatatagccggtgttattgtcaacggacaagaaactcttgtcgttgacatcgaccgggatggaatagcagatgccatggtggcagatatggacaataatggaataattacagacaatgaggtcatcaatatagaagaggcaggcattcgcatggaaggattgtctatggcaaccacacaagcaaccggcgtaaacgaggatgctacattgctggcagacaatgacccaatacccgactatataaatgatgccgacgtaaccggctacatggcctaattctattcatcacactatatttactaaagctatgaaacgaacaaatataatcacattcatcctattattgggaagcacctccctgctctacgcacacgatttcaccgtcaccggaaaaagtggagagaaattcttcttcaacattgtagatgcaaagaaacaacatgtggaagttacctaccaagggaacatctctgccccccaaccctctctgtataccggtgagatatccgttccggcaagggtaaagcacaacaacacgatataccgtgttgtcggcattggcaagaaggcattcagtaatgcagcttccctaaaaggcattgtactgccttccgggctttcgtccataggcgattttgcctttgaaggttgcagcggattagagaaaatcgtatttcccggcaacagcgtccgctttggtgaaggagtattcttccggtgtacagcaatcgggcaggtaacgttgggcagcgactggacacaagtgaacctcaaaatgttccgctggagtgaccgtttgacctccatcgtcatcccggcaaagctcatcagcctgcagaatttgaaatcattgaaacagttgcaaagcatagaagtggatgccaataatccaaactttacttccatagacggaatgctctataacaaagacaaaacaattctgttaggttgcccccgcggacgctcaggaaagatacgtattcccgacggcaccaccgctatacgctggaaggctttaatcgattgtcccaatataacccaaatcgatttgcctgcttcattacagatactctcgtaccgggagttctcccagatggaacacctggagcaaatcatcatgcgcagaacagaaccgatatccaccgcagagctcaacggacaaaaagtattcctgataaaaattgccggcaagctgaaaatcaaactgctcatcccccaaacagcactaagttcctataaagaggcactttgctccacagaaggagaatatgctgaagtttcggccaacactcccgaaggattcccacccgaatatgccctgataccctcaatagtggaacccactaatatgctggggaaaagcatgttatccggagtaaaagatttttcaaaatatgataaaccctaaatatacagaaacaatgaagccgcaaaatattataatcgcctcgtgcctattactgatgtgttgtatcatgagtaatctgcacgcatccacattccacccccaaaatgtacgcagtaataacgacacaattcaggccgtcaggctaaaagttttgagtgctcaggaaaagtctcttcagaagaagatacaggaacaagacaaaaagcggaatgccacctacaatgatgtctccactgagacaatggagagattaaatgaccggcaagactctatctgcctggatttacgttcccaactcgtaacgatacaattagaaatggcagaaataaagaaagagaacttgaaaaaagtactgaataactgggaaaagaaagggaattgattgatatgcagttgatagagggcacccttctacaagagggtaaatacagaatagagggaatacttgggcaaggcggctttggcatcacctatttaggatggcaaacaagactaaaccgtaggatagccatcaaagagttttttatgaaagagtattgcaaccgcaacgccgatacgtcacacattaccatcgggacggaaggaagccgtgaactcgtagctcgttttcagcaaaaattcataaaagaagcacaatccattgccggacttaaccatcctaatattatccgtatacatgatgtgttcgaagaaaacgacacagcttactatgtgatggaatatatagaaggaggttctctgcaagaatatgtgacgcgatacggtgcactacaagaaacggaagcgctgcattacatccatcaaatagcaggagcattgaactatatccaccaacggcagatgagccatctggatgtgaaacctggaaacattttgcggagagaagagggagaagtagtgttgatagacttcggactatccaagcgatacgatgaaagcgggcaacagaccagtactactccggtaagtatcagtaccggatatgcaccaatggaacaatatgtagctggaggagtgcaaatattcacaccaactacagatatttattcattaggtgctacactctataaattgctgaccggaacgacaccgccggctgccaacattgtgttcgatgacggactaccagccttacccgcaaacatatcggcaactaccgaacgagcgattcgtgctgccatgcaacccaaaagacaacgtccacaaagcataaaagattttttagaattgttgaataaaccggaaagagaggatattaccatcattgccaagaaagaaaagttgcctccccaaaaacagccctccagcagtaacaagttacccatatttataggggttgtcgtcgcacttctgttagcaacagttgtctggtttactcaaaaaccaagtgataccactcctcttaaagaagaagcctttgctacggaagtaattccaactgaaaacaatccggtagatcttggcttgagtgtgaaatgggcagcctataatgtcggagcatcttctcccgaagaatacggaggactatatggatgggcggacccgaccggagaaaaaaagcaacaaatagtaacgattctctcagtggcactccccctttcaacattagcggcactcaatatgacattgctcgtgctaaatggggagagaaatggaggctacctacacagcaagaattaaaagaattatctgataaatgtatatggaaatggactgaatacaaaaaagttgcaggctatatggtaacaggaccgaatggaaatcgaatcttcctccctgcatcaggatactgctacgcttacggtggaacggtatatggtcgaggaagaaatggccgctattggtcaggaacacgaaagacagctaatagcacttctagtagcgcctccagcctcgtcttcagtattaacggctggagtccgttgtacagcgactattgtaaggagggaaattccgttcgccccgtatcagaataaactgttatagtttgcattattttaattttaaattccgccaaaataaaaaactatgcaattacaatcaggttctttccttcaaggaggaaaatacaagatagagtccatattgggacaaggtggctttggaattacttaccaagcccttcagaccggattgaaccgtcaagtagccatcaaagaattcttcatgaaagactactgcgaacgcaatgagaagacttcacatatcattatgggtacccaaagtagccgggagttagtagaacgattccgccaaaagtttatcaaagaagcccaaatcattgcaggattggcgcatacacacattatatccatctatgatgtatttgaagaaaatgacacagcttattacgtaatggagtatatagatggcggttctttaaaagaacggattgaaaccaatggagcaatgtccgattctgaagcattaagttatgtcctccagatagctgatgcgttggaatatcttcatcaccgtaaaaccatgcacctggacgtaaagccatccaacattctgcttcggaacaatggagaagctgtactaatagacttcggtatatccaaacgttatgatgacaccggtaaccaaacaagtagtacgccaatcggtatcagcaaaggatatgcacctttggaacaatataagcaaggtggagtaaaaacattctcaccaggtacagacatttactctctcggagcaacattgttttatttgttgacaagccaacaaccgccagaggccagtgatgtgaatgacgagggactgccagcattgccaacaaagataagtccattgataagaaaggccatacaaggtgcaatgcaacctcgatgcaaagatagaccgcaaaacattaatgaatttctcacattattgaatgaagggataaaacctggtttggaaaatgaaactacaatattagatacccctaaaaatgaatttgtagcaaaagagcatccttcttccattccaaagcctcaacgaattttcttattcaaaaaagaatggctttggggagttatagctctaatccttatattatgtactatttggctcagcagaaccaacaagacgagtaatatcgcacaagacaactctttagctattgggcttgacagtactgtatccgacagtgctatacttacatcgcctatatctatgaataattcggctctgcatgattcatctattcggtatgagaactctaatacagaaattgggcaaacaagaaccaatgttcaacacaatgaaatctcaacagatcaaattgtagatttaggtttaagtgtaagatgggccgggtggaatctcggtgcctcaactcctgaagaatatgggaatttatactactggggagattccacgggaacagccagcagtggacctacctctattaacatttatgattttgatgatatttgtggctcggagtatgatattgcccgaactcaattagggaaatattggcgtatgccaacagcaaaagaattcatggaacttagagataagtgcaagataacatggaccacttaccaaaaaatagggggatacaaaattaccggacccaacggcaacaatatatttctgcctgctgtcggtatcaaaaacggacaaaatatagaaaatcgcggttccatagcatattattggactggttccgtagctttaataggagggggatttgtcaaattcaaaagaggacgcgctttcctattgaaagattcagttagggttatgcccaataatgttgcactccccattcgccctgttatccccaaagaagaaaaacaaaagaaagaagagcaacaaagaaagaaaaaaagaaagagccttgaagaacgagttcccaaatttgcatcttctccagcagatagatttaattcagagatttgttacaattgtaacataaataataacaaacaatcaactacttaataatatgagtaatataaataattatgcacttaaacaaaataccattttatatggtaaatcacatacctataccatagaaaagatattgggtcaaggctctttcggcatcacctacttggctatgacccaagtcaaagtttccggagcattgggtgaactcgaaacaaccatacaagttgccatcaaggagttcttcatgaaagacatcaatggacgagaagaaaatactgttacttgtggaagcagaggaggggtctattatgactacaaaaagaagttttcgcgcgaagccgaaaacctgagtaagctgaaccatccccatatcgttaaagtgctggaatacttcgaggccaacaacacagtctactacgccatggaatatgtagatggaggaaatctggatacatacatcacacaacaaaaaggcttgacggaagcagaaagcattatgtatgccaaacagataggagacgctctatcttacatgcacgctcataagatgcttcatctggacttgaaacctggaaatattatgctccgtaagaatcaggaagccgtacttatcgattttggcttgtccaagcaatatgacaaaaatgggaaaccggaaacaagcactacagtgggaagtggtacccccggatatgcaccgatagaacagagtaattatcatgaaggtaaagacttcccggcaacgatggacgtgtatgcgcttggtgcaactatgtataagatgttgacgggaatccgtccaccagaggcttcagaaatattgaatgacggttttcctgcatatgagctacaaaaacatcaagtaagcgattcgttaatagccagtatcgcaaaagtcatgtcggctatgaaaaaagacagaccgcaaagtgtagccgcatttttaagtatattggaaaataaggatacggaaacaactcccaaagaagatataggaataacgctggaggaagctacggttatccaaacatccgccaatgaagaacagactatgccttcaagtgacgacatatcttcccagccccaccccaaaaatctaaaatatattattcttgtcctaatagctgttctgtctattggaggaattatagcctatattacttccagaacaggttccaactccgatacagatacagaaacagaatggctgtccgcaacagacactgtaacaaattctgaaccgaataacgcatcatcagtaacagtacatgcaagcacatctgctgaaaatataaacccgaattctcatgtaaaagaaaatgcagcgaccgggaatgtagaacgccctgcgcaacaaaacaccgaaacagcaaacctgagtgccatgagtgccaatatgcctccaaagaaaaagaacggctttaaggaaacagccaaagcagcagagcaagggaatacagaggcccaatatgagttaggaagaatgtactttcttggtcgggatgtcgcaaagaatgctactgaagctgaaaaatggtatcaaaaagcagcaaatcaagaaaatgcaaaagcccaaaatgaactggggaacttgtattatacgggacttaatgttacgcgaaattattcggaagcaataaaatggtatcaaaaagcagcagaacaaggcattgcaagtgcccaatataaattgggatatatgtacgattatgggcaaggtatttctcaaaatagggtagaagctgcaaaatggtataagaaagcggcagaacaaggaaatgtggatgcacagtatagactaggcaatatgtttttctacaaggtaggcattccagaagatatagacgaagctataaagtggtataagaaagctgcagaacaaggagatattaaagcccaaaaaaaattaggagagatatattccaatggagccagaaaaaaagacccagaagctataaaatggtataaaatggctgcagagagaggggatgctgaagccttaaaacgactaggagatatatacgagaaagaaaatgccttggaagcagtaaagtggtataaaatggcagtagaacaaggcaatgctagtgcatcttttgatttagggctaatatacgaatatggaaagcccggtattcctaagaacaaggcagaagcaataaaatggtataggaaagcagcagaacaaggaagtgaaactgcccaaaaaaatctacgcaaacttgagaatgagtaatagagttcgcgtagagatagcaggtacttccttctatacgattatttcatacaagaatcgccatctgtatatagattaccatttcaatttccaccaaaataaaaagctatgcaattacaatccggcactctcctccaaggaggaaaatataaaatagaaacagtcttgggacaaggcggctttggcatcacctatcttgccacacaagtggccttagaacgcaaggtagctattaaagaattcttcatgaaggaacattgcaaccgtgacgttgcaacttctcatgtatcagtcggttcacaaggcagtcaagaattagtagcacgtttccgccagaagttcgtaaaggaagcccggatgatagccgggctgaatcatcctcacatcattcgtatcattgatgtgttcgaagaaaatgagacagcctactatgtaatggaatacacgggaaatggctctcttgcagaatatctaaaaaggaatggagcagtcagagagtctaaggccctccattatatctaccagctggctgatgccttaaagtttattcatcagcaccaaatgaaccaccttgacataaagccagggaatgtattgttagacaataataacaacgccacccttatagactttggactatccaaacgctatgacggtgaagggcatcaaaccagtacaacccctataggcatcagtgccgggtatgctccaatggaacaatataagcaaggaggcgtcagcaccttttctcctgcaacagatatctattctttgggagcaactttatacaagctcttgacaaatgagactccacctgatgccagtgatgtgaatgacgacgggcttcctccacttccaccgagtatatcccaatcaacggcctatacaattgagaaagccatgcaaccgcgccgtagagaccgtccacaaagcattgatgaatttttatcgttattgactaataacaataagccatcaatgcagtataatgaagaagaatctgaaacaactataattccctctatctccccaaaggcagaagaagaaccgggttcacccaacattcctcccaaacgagccaatcatctttcaaaccgggaaatatggttgattgcaatattaatattgttggtaacctctatttttgtaataaacaaaacaagctacaatgtgcctgctcagaactctgatacagcagttgcaatagaaaatccaatccctaatcttccggctcaaccaattgatttaggattaagtgtaaaatgggcaagttggaatgtaggtgcaagttctccggaagattatggaggcttatatggctgggcagacccaacaggaaacaatacatctacaaataatactgattatcccaacaacaatccaccctccaatatatgcggcaccaattatgatatagctcacattaaatggggagaaaactggcgtttacccacaaaaaatgaagtgttggaattatgcgagaaatgttcatggaaatggacttcatataaagggagcaatgggtatatgataacaggccccagtggaaattacattttcttaccagcagtaggtcaacgctatggcactaacattggcagtcaaaaaaactttggctattattggtcagggactttatactccacgggatattcaaactacctttctttcagcaacacccaatatcagctaagcttcacccttcgctatcttggatgttctgtccgtcccgtttcaaagtgaccaacatttaaaacaaaattcaaagttaatatgcaaggaactcaacaatcattaagaaaaggtactattctatctggtaattcctacaattacaagattgaaggtattttaggccagggggcttccggtatagcctatcttgcttcaatacaacttcaaggagagttaggttgcctaaatacccatacacaagtagccataaaagaattttttcagaagaatttcaatggtagggagggcactactgtaacttgttccaatgaaaaggcttttaaagaatataaaacaaaattccttcgggaagccaagaatctttcaaaactcaaacatccacatattgtagacattctggaagcttttgaagcaaacaatacttgctattacgtaatggaatatttagaaggcgggagttttgattcttatataaaaacagaaaacggtctctccgaatcagaagctttgacatgcatccgtcaaataggggaagcactgcaattcatgcataacaataggatgttgcatcttgatctaaaaccgaagaatataatgcggcgtaaagatggttctatagtattaatcgatttcggcctttccaaacaatacaattcacaaggagaacctgaaacaagtactgccatcggatatggcaccccaggctatgccccaattgaacaaagctgttatcgcgatggagaaggttttcctataacaatcgatatttatgccttaggagctacattatttaaaacattgaccggaaaaacgcctcccaacgcttctaatattatgaactatggctttccggaagccgaattgcaagaaagaaacatcagtaacaagaccattactgccatacagcatgcaatgaaaccagaaaagaatgcaagaacacaaactgtagaaacttttatccaggaaattgaaggaggtcatgcagaagacaccattcttattgaagataattcattgatagttttgccggaaacaaacaaaataaccctatcattagaaaaggtattcatgggaagtgatagaaatttttctacagatattataatcaccgcaaactctattgcacttaccgtaaaagtattcactataccagaaaccaagatacagacttatacttatccatatacctctcaaaaattcaaaaaactattatcaaacctacgagagttaagtttacaaacagcttatgactcattcaattatgaagtggataatgcaccagatattttttaccgcatgcgattctccctcttctctacaaaaaaatcctatgcagatataaaggtggagtatgaggctttagatgaattacgcaccaatgaattgcccaaaaactggcatggcatattctcaaggcttcaaagggccatcacttcccaaattccttctttcaacgaaactgttctcacagtagtttctaataaaacgccccctgaagagggagcaaaggtcataagcatagcaaaagaaagctttatggccatctttgctggagtcatgactctaatgctaataattggacccaacataggagtaggaggaattatcaccataacaagccttgtcatcttaccagacttgctcatattttggttatcacctcgaaagaagcttcatgcgattttattttctgcaacaatcatactactactcgcaatcaaccatataacacatcaataaatcttatagattatgcaattacaaaacggaactcttctgcaaggaggaaaatataaaatagaaacagtcttaggacaaggagggttcggcatcacctatttggccacccaaacgctaaccgacaaaaaagtcgctataaaggagtttttctttaaagaatattgtgagcgtgacaatgtgtcgggcacagtaacagtgccaacaaccagtaagaaaaaatttgtagagaagtttcaaaagaaatttctaaaagaggctaagattagctcagacctcaatcacaagaatattatacgagtgcttgacgtatttcaggagaatgacacttcctactatagcatggaatatatcattggaaaatcgttggcacaagaaattaatgccaaagggaaaattgatggaaaaaaattctcaaaagacatgattatgcgcccttatgcgatacaaaacgacataaaagctggtttgaaaaaatatttcggggtggtgaccgatgacgagctgatggacaaccttcaactgaacaacgaattatacaatatcaacaacctccctctgcccgaaacagacccatggattacaaaagatggtgttttcttctcgtatgctccctatgaaattgccagttacgcagcaggcgctccctccattgtgatacccatcagcaaagtcaagaaccacgtcacttctacagcaaaaacattctttgatgaataaaacgacctcatcagcttgagaatgaccacctatacggttatttcatacaagaatcaccgcatttcatgtaatatacacaaatccttatataggttatcatttcaaatcaatatctttgaaacataaaagaaaacattggttatggaaaagaagcagttaaaagtctcagaatcagaatacgctaagaatcttggagtagctgcaagcgcgggagcagcaataggaggagcggcttttgcagcagcagcttattcaacaagagcatgggaaactgactctaatgaagacaacgagacactggaaattgcagaggaaagcagcactgatgagatgatacaaccagaaactgtatctatagaaatatcagatcccgtcactgcagacatagcctacaccatagaccctctttctccggctgaaagtgaagcgatagacatggccagtacggagaatgatgaaattgtcatcgaagacattgaatatccagacgaaggagatatctttcaatcagatatgcaagacgtcatggactgggtagcaggagaaacgatggatattcctttgctggacaatgctatatacagtgatgataccattgtagaagacagtcaactgttttctatatgaaaagacattattaatactaaaaaatatcagccttatgaactcagaagacaccattcttaaccagcaacagaacgacaacgaagaaacattgccgaacaacaatcagagcacctcaaaggaacagcctgcgaaaaaagccagttcatggaaacatgtaacaataggtggcatatctggaattttattaggtggcgccagtacctttttcaccagctcttccagtgccgccaatgacagtgacgctcccagccacggcagccagtcagcaacaagccatggctctactcccgtttctccagactcacacatctctgtagaagggttaccggttgcaacagtcagtgacgatatgtctttcagcgaagcctttgcagcagcgcgccaggaggtaggaccgggaggagtctttgaatggcacggtgacgtatacggtacatattacgccaatgaatggagtgacatgacaccagaacagcgggcagaattcggaagtcgcgtttcctatggagcaagtggttcgggaaatcacgagacagcagaacacgctacagaagagagccataatgtagcggaacatcatgcaacggaagaaccggaaatagtcaatgtggaacatgaaaatgcacacgttgaagatgaagttcagattgtaggaatcagtgatgaaaccatggatgacggctcgatggttaccatcggacaactggaaataaacggacaagaagtttatgtggtagatgtggatcataacggcactttcgacctgatgggagccgatgtaaatggagatggagtaatcagcgaaaatgaagtctacaacatacaagaccaaggactggaagttgccgatttgcagcagcagatggatgcaataccctcggatgattatctggcagatatgcctgattatattaatgatgctgactccagcggatttgcctaatcaacggacaagatgagaatgaagcggatattattttcactgatatgcatatgcttgtttagcctgcaaagcctggcacagaatatatatttagtttccgtaggcattgcagactatcccggcacagagaatgatttaacattgcctgccaaagatgcagagaccatacaatggatatatcagaaaaatcagaaagcagaaacaatattattaatcgatgcacaagccacccgaagtaatgtattaagcagtatgacgcgaattttcaataaagcctcagccaaagacatcattgtccttttttttagtggtcatggatataaaggtggatttgtgggctatgatgcaatgattacttatcaagacatcaagaaaacaatggcaaaaagtgcagccaagaacaaaatgatatttgcagatgcatgtttctctggaaagatgagagaaccacgtagaaactcatcgaatatatccccctcttcattaaaagtaatgctgttcctttcttcccgtgaaaatgaagtctctatagagtctccttccatgaaaaacgggttcttcacaacatgcctgcaacggggactacgaggcggagccgacgtaaaccgtgatcggatcatcacagctaaagagcttttcgaatttgtcagccaaggggtaaaaaagctgtcaagggacaagcagcaccctgtcatgtggggtaagttcagcgattctatgccggtaatgatatggtaacaataatagaatagaacaaatggaatcagaattattaagaatcaagtgtccgaactgcggtgccgttctgactataaaaaagatagcaggcctggaaaccaagagtattccatgcccagtatgcaaaaaggcatcaaagtacattgactacaaagttcccaaacaacaatatactccaccgaatgaaaatgatgacaccaccatgggagatgaaacccacattgaccattcaaaaaatcagagtatcggcaaacttcagaaaattggcacaagtcatatgtatactttatccctagggataaatacaatcggacgaaaggcacaaacatcaaacgccactgtacagattgatacagatgaccttacaatgagccgttcacattccattattgaggtacgcaaactgaaaaccggtggttatatacactatttttcgaatgctcaaaacaaaaatgccacttatatcaattctggattaattgaaaatggtgaccgtatcatactgcatggaggtgaaatcataaaaatgtcgaatacgacattgaaattcatacttctttctgaagatgatacaatcatttaaacctaaaacaaaattggatatgaaatatgttttaaaccccttaactatctacgaattgggacaacggagcaatcaggaagattccatcttccccgtatcaggtgaagtaacggcagaagaccgcctgtttatcgtatgcgatggaatgggtggtcatgagtcgggtgaggttgccagccagacagtatgccaaacgatgagtgaatacatcttgtcacaaacttcaccggaaggggctttcacagacgagcaatttaacgaggcgctcaatgcagcctatgattcattagaccaaaaggataatggtgccgccaaaaagatggggaccaccatgactcttctgaaatttcatagtggcggatgcctgcttgcccatatcggtgacagccgcatctatcatatccgaccttctgaaagatacattttccacacaagagatcactcgttgataaacgacctatatgacatcggtgaaatcacccttgaagagatgaaaacctcaaagcagaagaatgtcattacccgtgccatgcaacccaacctggaaagacgtcctaaagcagacataaaacatattacagacatccgccccggtgactatttcttcatgtgctcggatggcatgttagaggaaactgacgatagtgacttgctgaatatcctctctgaccctgacacaacagatgatgaaaaaatacaaatcctgaccaaggtcagtgaaaacaaccgggataatcattctgcatttcttattcatattttagacttaattccggataattatacaaaagaagaaaaaggcaaagaagaaagtcctatagaatccgttccggacaaccgtgtcatgactgctggaacaaggacaatcgaaagagaggggaaaaagagcgctgaaactaaagaggataagagacaaaagcgcaggctgccgattgtcaagattcttgcattcgccatattactttttatcgttatctacgccgcttctttcgttctgttgaaagctataaagggggagaaagagcattccaaaacaaatcaccaaatagaaaacactatattacaaaaataatccaagaatatgcagctactatcggaaacatctctgcaaggaggcaaatataaaatagaaaaagtacttggccaaggtggttttggcattacttacttagggcttcagacgggactgaaccggtctgtcgccattaaagagttctttatgaaagaatactgtgaacgcgaagagactacttccaaagttcttctgggctcacaaggtagtcgagatatagtggaccgtttccgaataaaattcataaaagaagctcaaaccattgcccagatggacaatccgcatatcatccgcattcatgacatttttgaggaaaatgcaactgcatattatgtaatggaatatattgacggagactctttggacaggttaatacagaagcaagggaagttagacaccgcggtagcattaaactacatctgccaaacagctaaagcattacagtatatccatcaaaagaagattttacacttagacatcaaaccttccaacattctgctcagaggtgaggaagatgctgtattaatagatttcggaatttccaaacgatatgatatagacggaagtcaaacgagcaccactcctacaggaatcagtaaaggttatgcccccatagaacaatatagacaaggtggtacaagcatgttcatgcccagcacagacatttattcattaggcgctaccatgtataagttactgacaggagaaacaccgcccgaagcttctgacattgtagacgaaggattaacaattccagattatatagctcccagaatagcaactgcaatagaaaagtgtatggctccagcacgcaaacaaaggccacaatctattacagaatttctgtccctgatagcaatggagcctcatgaacatcctcaagacggtacatcttcttctaaggaaaacacggttatacaaaaaaggacagaccaccaatatctatcaattgacgtaaaaggaattttattcaaaatgtgtttcgttgaagcaggaactttcatgatgggagctacttcagaacaagagcacgaagcctatagtgacgaaaaaagcaacaaaagagtggatatacagaacttctacttgggagaaaccactgttacccggaaattatggaatgcgattatgggaaactatcaatcggaatccaaagaggagaatcttcctatcgagaatatatcatggattgactgcatagattttattcaaagactaaacaatgttaccggacgcaagttccgtcttccaaccgaagaagaatgggagtatgcggcacgaggaggaaatcaaagcaaagggtataaatacgccggttcaaattctattgatgaagttgcatggtatgatgagaacagcgaacatcacacccatcccgtggctttaaaaagaccgaatgaattgggattgtatgacatgagcggaaacattcaagaatggtgttcctctttctacgaatatggctcaaatcggactctacgaggcggatgctatttatcatcaccacgaagatgccgtgtttcatgtagaaacaacaatagccaagtgtatcatgatgcaagcataggattacgattggctttataaacagctacggagcgggattccacatgaacttcctcctttatatgacttgtttggctatccatgcacaagcctccgcatccgccaatgcatggtggtgttgctccagttggtagccacaacaagctgccactgtgtgcaactgatagttgggcaatcctttcaggacgcgacgtgatgcctgcaaagtacaatgaaactcataatccggataatccatgcagtaagtacggaaaacagctttcaggcagctttcatcaaaggccttgttgtgcgctaccaatggcaagccttcaatgcgaggagctatttcctgccacacaacgggaaagataggagcatcccgggtatctgccaacgtcagaccatgcacgcgggtattccaataagtgtaatactccggttcgggacggatgaggttataataatggtccacaatctctccatcacgtacgataaccactcctacactacaaacgctggtacgctgttcgttggccgtttcaaaatcaatggcagcaaaatctttcatccgatatggttttatagtcgccaaagatacgaaaaattcactctgttcctttcattctacacctggtttccattatctttgtcccccggacaaaggctaaaatatcatggaacatccactttcgcaattcaaatattgtccgaaatgcggttcagcccatttcgaagttcataacgggaagtcaaagcaatgcgccgactgcggtttcgtctactacttcaacccctcttccgccaccgtcgccttaatactgaacgaatgcgacgaactgctggtttgccgccgtgccaaagagcctgccaaagggacgctggaccttcccggaggcttcatcgacatgaccgagaccggcgaggaaggcgttgcccgcgaagtgaaggaagaaaccggcatgaaggtggcaaaggccgaatatctcttctccctgcccaacatctacatctattccggcttccccgtacacacgctggatatgtttttccgttgtacggtggaggacaccttgcacttcaaggcgatggacgacgcggcagacctcttcttcctccccttgaaagatatccgtacggaagagttcgggctcggctccatccgcaaaggagtgggtatcttcctggaagacatgcgaaagaacaaaagcgaatgattattcgttcctattatggtatatatcctaaaaaagccaaacaagtgtaacatttccgggttaaaacccgtatttttgtaaaatacctattctaacaaaagaagatgaaacataaaatctcccgaatattgtgcacagcactctgttgcgcacctttactcgcctcagcacaaacaagcgagaagagtacttctcccaagcgactctaccaggaaggacagacgttgttccaacaaaaggcctatgccgccgccatctccccgttgcaagcctatgtacgccagatgaatgcagacggcaagcctctgcccgacacgggcgagcgacaggaagcggaatacatgctggtatgcgccgcatacgaactcagagaccccaaaagcatagacctgctccgtgccttcctggacgaatatcccgatactccccatgccaaccgcatctacgcactgattgcctccgcctacttcttcgaaggcaattatgacgatgccctcgccatgttcaactccgcccgcctcgacctgctgggttccgaggagcgagacgacatgacctaccgccttgccacctgctacctgaaaacgggcaacgtaaaggaagcagccatctggttcgagactctgcgtagcaccagccgcaagtatgcagcggactgtgcttactacatctcttatatccgatatacccaaggacggtatgacgaagcgctcagcggtttcctgcctttgcaggacaatgccaaatacaaggacttggttccctattacatcgccgaaatctatctgttgaagaagcagtacgacaaggcggaaatcgtggcgcagaatgcactgtcagcccatcccgacggtctgagctacacccacacggcggagctgaaccgtatcctcggtacagccgaataccatttcgggaagtatcacgaagccgtaaagtccttcggacaatatatagaacacaatgccgaatctgccgctcatagaagggatgccctttacatgctgggaatgtcctattatcaatgcggcgtgtattcgcaagtcccctccgtcctcggcagagtgactgccgaaaacgacgccctttcgcagaacgcatacctgcacatgggactgtcttatctgcaactggcagacaagaccaaagcgcgtatggctttcgagcaggctgccgcctccaacgccgatatgaaagtcaaggaacaagccgcctataactacgccttatgcatccacgagacctcctattccgctttcggcgaatcggtgaccgtctttgagaaattcctgaacgagttcccgaactctccttatgccgagaaagtcagcaactacctggtggaagtgtacatgaatacacgcagctacgatgccgcactcaaatccatcgaccgcatctcccatcccagcaaagccattctggaagccaagcagaagattctgttccaactcgggacccagtcttttgccaacacacagttcgagcaagccatcggttacttcaaccaaagcgtcacgctgggacaatacaacctccagaccaaggcagacgccctctactggctcggcgagtcttattaccgcctgaaccggatgagagaagccgcccgcaatttcaacgaatatctgtcactcacccggcagagggatacggaaatgtttgcccttgcctactataacctgggctacatcgctttccaccagaaagactattcgacggcagagaaccgtttccgcaactttgtccaactggagaaaggcgaaaacccgaccgcattggcagatgcctacaaccgcatcggtgactgtaacctgcacgtccgccgtttcgaggaagccaagcaatactacgccaaagctgagaacctgaacactcccgccggagactatgccgtctatcaattagcactggtatatggcatgcagaaaaactatacggaaaaggcgagcatgctggaccgacttgcagccaaatatcccaactcgccctacgccatcaatgccctctacgagaagggacgctcctacgtacagagcaacaacagccgccaggctatcgccaccttccgcgagctgcttgccaaataccccgaaagccccgtcagccgtaaagccgccgccgaaatcggcctgctttactaccagaacgacgactatgaccgtgccatagaagcctacaaacatgtagtcacccaatatcccggaagcgaggaagcccgccttgccatgcgcgacttaaagtccatctacgtagatgccaaccgcgtggatgagtttgccgcccttgccgcccaaatgccgggagaaatccgcttcgaacccagtgagcaagactcgctgacttacatcgctgccgaaaaagtatatatgaaaggcgaagccgcacctgccaaagagagcttcacccgctatctgcaaagttatccgggaggcgctttcagcctgaatgcacactactacctctgcgtcataggcaaagagcagaaagatgacgaggcggtattggaacatgccggaaaactgctggaataccccgataacccatattctgaagaggctttgctgatgcatggagaaattctgttcaaccgccagcaatatgacctggcattggccgactacaagaaattgcaagccaaagccaccacggcagagcgccgccagcttggcgctatcggtgtactgcgctgtggagcactgatgcatgatgatgcggaagtcatcaacgccgccacagccttgcttgccgaagccaagctgtctccggagctccggaacgaggcattgtactaccgtgccaaggcatacctcaaccagaaagccgacaagaaggcaatggatgaccttcaactgctggccaaagacacccgtaccctttatggagccgaagccaaatatctggtggcattacaatggtacaacaccggtaattatgcctctgcagaaaaggaaatccttaatttcatcgaccagagcacaccgcatgcctactggctggcacgcagtttcatccttctgtctgatgtatatgtagccatggacaaaaagcttgatgcacgccaatacctattgagcctgcagcagaactaccaggccgacgacgatatagcaagtatgattgacgaaagactggagaaattgaagtaagaaatatagcacattatgaaaaagaaacaatatatcctcgcaggaactatgcttgtctccctctcttggggagcacaagcccagacacaaccccaagacaccaccatgaaccgtacggtagtcgtggaacaagaatataatccggacatcatggatgcctccaaagtgaacgtgcttcccagggtggaacctcctaccgtcagcaaaaaggcggtggaatatgacgccaccctgatgccggcaacccatatcccggcaggtatcatgcaagcctataccggaaaagagacgcaggcgaaagcgctgcccggatatgtacgcttgggatacggtaactacggtaacctcgatgtacgcgccaactacctcttctctttatcccccaaagaccgcctcaacctgacattcacaatggatggcatggatggcaaactggacttgccggataatggcgggaagtggaattcattctactaccgtacccatgctgccatggattatgtacatgccttcagcaaagtcgatttgaatattgccggaaagttcaaccaaagcaatttcaacttcctgcccgacttcgtcagcaacaagcagaaattcgtttcgggtgatgtacatttcggggtaagttccacgagcgacgatatgcctctccaattccgtgccgaaaccaatttgttggtctaccagcgccaacacgacctcatggtgagcaatatcaaagaaaatatcgtgcgtaccaaagccgatgtcaccggttccatctccgatgagcagaccatcggcatggcttttgccatggacaatacattctacagcgacggacgtttcaagaatcacaccgacgtagacttcaatccatactatctctttcagaatgacgactggaaaatacgtctcggcgcacacgtcgacctggctttcggtttcggcaagaagttccgcgccgctcccgacgtagaaatacaatacatcttctcggacagctacatcctctacgcacaaggtaagggaggacggctacagaacgatttccgccgtctggaaaccattacgccttatggcattacaaaccagcagcttgacaatacctacgaacagctcaacgcagccatcggcttcaaggcaagcccggtcagcggattgtggttcaacctatacggcggatatcaagatttgaaaaacgacctgattgacactccgactgtcaagtccgacgggataagcaatgtttacctcacagaagataccaagaacctctacgccggagccgacctgagctacaactacaaggatgttttctatctcgccgccaatgccgtctatcgccattggacaacggactcagacggttctgatgtcgtagtaagcttcaaaccttccgtagaaggcaatctcaatctcaaggtacgccccatctccccactgcttgtcggcatcggctatcagcacatctcacgccagggcgtggagggcaacaaggcggaccccgtcagcaatctctatctgaacggcagctacgaactcttcaaaggtatctccgtgtatgcgcgcgtgaacaacttgctgaacaaagattaccagtactactggggatacccttcagaaggtcttagtttcttaggcggagtaagcttcctcttttaataggggcagcacaagccggagctctaaattgaacaaaaaaggtcatttttgctaaattctccttatattataaggtgggaagaatctttttttcctacttttgcgggcgaattcagtggcgggagtcactaaaaaacagaaatttatgcagaaaaaccttgtcatagtcgagtctccggcgaaagcaaaaaccatcgagaaattccttggaaaagatttcaaagtcctttccagctacggccatatacgtgatttgaagaaaaaagaattcagtattgacgtagacaaagacttcaaaccgcattacgagataccggcggataaaaagaaaatcgtaacccagctgaaagaagaagccgagcaggcagaaaccgtatggctggcttccgatgaggaccgcgaaggggaagccatcgcatggcacttgtacgaagtgctgaaactgaagccggaacacaccagacgcatcgtcttccatgaaatcaccaaaggtgccatcctgaaagcgatagaaaatccccgtgacattgacatcaacctggtcgatgcccagcaagcccgacgtatcctggaccgtatcgtaggttttgaactttcaccggtattgtggaagaaagtgaaacctgccctttctgcaggccgtgtacagtccgtagccgtccgtctcattgtagagcgcgaacgcgagatacatgcattccagaccgaagcatcctaccgtgttaccgccgtattcctcgttccggacactgacggcaaaacagtggaaatgaaagccgaactggcgcaccggcttaagacaaaggcagaagcccggaaattgctggagagctgtaaagcagccacgtttaccatcagcgacatcactacccgtccgctgaagaaaactcccgcagccccgttcaccacctctaccttgcagcaggaggctgcccgcaaactgggcttcaccgtggcacagaccatgatggtggcgcaacgtctgtacgaatccggattgataacctacatgcgtaccgactccgtcaacctttccgaacttgccgtcaacgccagccgtgaaaccatctccaacctgatgggcgaacgttacgtacacaaccgccacttcgccaccaagaccaaaggagcgcaagaggcccacgaagctatccgccccacctatatggagaatgccaagatagaaggtaccccacaggaaagaaagctgtacgacctcatctggaaacgtaccatcgcctcgcagatggcagatgccgaagtggaaaagacaaccgtaaccattgctatcagcaacgagacggagactttcactgcaaccggcgaagtggtgaaatttgacggtttcctccgtgtctaccgcgaatcatacgatgatgacgtagaaacccaggaagatgaggcacgcctactgccccctctgaaaaaaggacagaagctcgaacatgaaggtatcaccgctaccgaacgtttcacccaacaccctccccgctacacggaagcaagccttgtgcgcaaattggaggaactgggtatcggacgtccgtctacctatgctccgaccatttccaccatccagcaacgcgaatacgtgataaaaggagaaaaagcaggtgaagaacgcacctacaatgtgcttaacttgcagggtaatgaaataacggacaacaaccatacagaaatcaccggagctgaaaagtcaaaactgatgccgacagacaccggtattgtggtcaatgacttcctgatagagtacttcccggacatccttgactacaacttcactgcgagcgtcgaaaagcaattcgacgaaatagccgaaggtgacaagcaatggaccgccattctgaaaacattctataagaaattccatccttcagtagaaaacacacttgccgcgaaaaccgcccacaaggcaggcgaacggattctaggaacagaccccgtcagcggaaaacaagtgtctgtaaaaatcggacgtttcggcccagtagcacagataggtactgccgaagatgaggaaaagccccgtttcgcccaggtaaaaaaagaaatgtccatcgagaccattacgctggaagaagcgctggagctgttcaaacttccccgtactctcggagagtatgaaggcaagaatgtagtcgtaggtgcgggacgtttcggaccttatatccagaacaacggcttgtatgcctcgttacccaagacaatggacccgatgaccgttacgctggaagaagctattgaacttttgcaaaagaaacaagaagcagaagcccagaaacatatcaagaagtttgaggaagaaccggaactggaaatcctgaatggacgctatggcccttacatcgcttataaaggcagcaactacaagattcctaaagacatcatccctcaagacctgaaccttcaggcttgtctggaaattgtgaaactgcaaagcgacaaggatacgggcaagtctaagcggactgcaaaggtggtgaaagcaacgaaaacgactaaaacaaccgccaaggcaactgccaaaacaagcaagacaaaataggacttagtctacacgtataaaatgggagaaaggaggcgataatttaaacttctattatttataccacaagaataaaaattgtactataaaagaataagcccgaagaagtatccccgggcttattcttttatagtgcgatgtttacatcctatccggcacctcaattcccagtaagcccatacctaagcgtaccactttggctacattctcggacaatgcaaggcggaataccttcactgcttcgttctcctcacgcaaaatgctgaagtcatggtagaactggttatattccttcacaaggtcatacgtatagtttgcaatgatggacgggctgtaatcctcacctgcctgcttcacaatagcggcaaagtcggcaaccatctgtatcaatccctcttccttctcactcagttcaatgccggcaggcaactgagcagggatttcgataccggcctcttttgccttgcggagaacagactggatacgtgcataagtatattggatgaacggtcccgtattaccattaaagtcgatggactcttttggattgaatgtcatgttcttgcgggcatccactttcaggatgaagtacttcaaggcacccagaccaacgatacgggcgatattgtccgcctcttcctttgtcagaccatccagcttacccagttcattgctggtttccttggctgtatcaatcatctccgccatcaagtcgtcagcatcaactactgtaccttcgcggctcttcatcttgccctcgggaagttccaccataccgtaagagaagtgcaccaaccctttaccccattcgaagcccagtttgtcgagcaggatggacaatacctggaaatggtaattctgttcgttgcctaccacataaatcatcttgtcgatgggataatctgcaaagcggagtttggcagtacctatatcctgcgtcatgtagacggatgtaccgtccgcacgcagcagcagcttgtggtccagcccctcccccgtgaggtccgcccatacagagccatcttctttccggtagaaaaagcctttctccaggccttccatcaccttctccttaccttcgaggtacgtgtttgattcgtaatatatcttatcaaaagttacacccatcatacggtaagtctcgtcgaagcctgcatacacccagtcgttcatcttcttccagagcgcacgtacttccgggtcattggcctcccactttaccagcatttcacgagcctccttcatcaaaggagattcagcttctgccttggctttggcttcttcctcattcatgccttcgctttggaacttggccatcagttctttcacttccgctttataatgcttgtcgaaggaaacatagtaatcgccaatcaagtggtctcccttcttgccggatgattcgggagtttcaccattcccgtacttctgccatgccaacatggacttgcagatatgaattccacggtcattgacaatatttgtctttactaccttattaccgttggcagccactatattagccaacgcatttcccaaaagattattgcgtacatggcccaaatgaagcggtttgttggtgttgggagaagaatactcaatcatcaccaatggagagttgtcagtagcggccacgatgccgtactgcttgtctgcatgaatgccattcaacaattctatccatgcagaggaggcaatggtcaggttcagaaagcccttgatgacattaaatgctgcaaccgaaggctcatttgcctgcaagtattcaccgatttcctgtgctgtctgctccggtcctttcttggacatacggaggaaagggaatacaaccagtgtgaggtgtccctcaaattctttcttggttttctgcaactgcacttgtgcggcaggaacatcctgtccgtaaagcgctttcagcccgccgataacggacgataccagtttctgttctatattcatgattcaaatgtattttcctgcgtgcaaagatagcgtaaaccgaaatcagaacaaaacaagcaggcttgtttttattgactcacaagatattcaacatacaaagaggggacgctctttgcaaaacgtcccctctttgtatgttgagtatactgtttttattcagctgtcaattctgcacctggtttgaatttaacaactttctttgcagcaatctcgataggctttttagtagaggggttgatacccatacgcgctcctctttccaccacactgaaagttccaaaaccaaccaatgatactttatcaccggccttcattgccttagtgactgatgcgataaatgcatccaatgctttctttgaatcagtctttgacaaaccagactccgctgccatagcgctaataagttccgccttattcataatgcttaaaattaattaatatgttacacaaaagatatttttacttttcatcacaaacctccacaaaaatagagcaatatttctgaatatcaaataaaaacattaaaaaaatattggaaaacaacgaaaaagaaggaatagaatctgctttttctgttatagaacagaatttattcgtatttttgccggagaaagcaaaaacaggcaactgtttttgaactgtaaaatgaattgaaacaacagattatgaatactatacctactgtaaccaagaaccttttaatcattaatgtgctgatgtttctgggtaccatcgtcgcccaaagctacggcatcgacctcgcccaatatctgggattgcatttttttcttgccgaagatttcaatgcagcacaattgataacatatatgttcatgcacgccggattcgcgcacatatttttcaacatgtttgccgtatggatgttcggacgtattttagagcaggtatgggggccaaaacgatttctgttctactatctggtgtgcggtataggagccggaattatccaggaggtggtacagtatattcattatgagacagtactttccgcctatgacagcgtaaataccggcatggccatcatcccgatggaggaatatctcaatatgatgactaccgtgggagcttcgggagcagtatacgccattctgctggcattcggcatgttgttccccaaccagcaaatgttcatcttcccactaccggttcccatcaaggccaaatattttgttatcggatatgccctgattgagctatatgccggatttgcaaataacgcaggagacaatgtggcacactttgcacatctgggcggtatggtattcggttttatcttgattatgtattggagaaaaaagaacagaggaaatggctactattataactgatttgaaagaaaactttcgcagaggaaatatctatatccagttgatttacatcaatgcagcggtattcatattcaccactctgactgaagtcatgctccaattgttcaatcggagtatgatgggaatattcgaatggctggaattaccggcatcactttcacgcttcattctgcaaccgtggtcactgctgacgtacatgttcatgcatgcaggattcatgcacattcttttcaacatgctgtggctttattggttcggagcactattcctgaacttcttttctgcaaagcatctgcgtggtgtgtacattttgggaggaatctgcggtggtttgctctatattgccgcctatcatattttcccgtacttccaccccatgataaattactctttcatgctgggtgcctctgcttccgtgcttgccatcgtagctgccacagcctatcgtgagcccaactatccgatacatctatttcttttcggaaccatccgactgaagtatctggcgcttatcgttataggcaccgatttgctattcattacctccagcaatgccggtggacacatcgcacatttgggaggtgcgctggcagggttatggtttgctgccagcctcagcaaaggcagtgacctgacctcatgtataaacaaatgtctggatgctttagtttccatcgtcagctttaaaccccgaaagccgaaaatgaaagtacattacggtaccagtaaacaaaaagattatgattacaacgcacggaaaaaagcccaatccgacgaaatagaccgcattctcgacaaattaaagaaatcgggatacgaaagccttactacggaggaaaagaaaagcttgttcgacgcaagtaaacgttaaacaaatggaaaacggaaagtggaatatggagaatgagaaaatagccgccactcttattttcagttttcacctttcaattttcaattattataatgaagtatttaggtaattttgtcgccctcctgattttggcggtcaatgccttgtttacgggcttgctactgtttaccgcctatagtccgcacatacagccggtcacacatccggtgcagtcgtgcctgggactgacatttcccgtttttctgatgataaatataggcttcttcatcttttggctggtcatccagcgttacaaaaccgcattgcttcccttgataggattactactttgttattcacagacacgcacttatctgcccatcaactttcatacaaacaagttgcctgaaacaagtttcaaattactctcatacaacatcatgggatttgacggagccatcaagcagaatggcaagaatcccatactgacttatttaaaagaaagtaatgccgatatcctctgcctccaagaatactccacgacagaatcatcccggcacctttcgcaaaaagatgtggaacaggaactcaaggcatatccatatcaccgcatcaacacggtgggcagggaaaaagggcataccaacaagatagcatgttattccaaatatccgattctctcggcacgtgtactagattattccagcgagtacaacggttcggtactgtatgaagtaaaaataggagaggatacagtcaccctcatcaacaatcatttggagtccaacaaattgaccaaagccgataaagccgtgtacgaaaacatgctgaaatcccctgaaaaagaaaaggtgaaaagcggtatgcgcctgctcatacgtaaattagcagaggcatcagccatccgcgcaccgcaagctgacacgattgcacacgaaataacagcttcaccacatccttgtatcattgtatgtggcgatttcaacgacacccccatctcttatactcatcgtaccatcgcccaaaatctggacgatgcattcaccaaatcaggacggggattaggaatttcttacaatcagaacagattctattttcggatagacaatatattgaccagcaagaacctgaaagcctacaattgtacagtagaccgttccatcaaggattcagaccactatccgatatggtgttatatcaccaaaaagaattgagaattgagaattaatacttaacatttaatacttagaaaacaatgttcaaaaaatgtattctaattttagcagcaagttgtatgatgtactcctgtgccacccagacggaaagcaatccgttccttaccgagtttcaaacacccaatggagtgcctccattcgataaaatcaagttggagcactatgaacccgcattccaaaaaggtatagaagagcagaatgccaatatccaagccatcattgccaatacggaagctcccactttcgaaaatgtcgttgttgctctcgacaacagctccccaactctggaccgtgtaggcggtgtattcttcaacctgacggaggccgaaactaccgatgaactgacagccctttccatgaaactggccccgacattggccgaacacgaagacaacatctcactcaatcaggagcttttcaagaaaatagatgctgtctacaatcagaaagatgctctcggtctgacccgtgagcaacaaagactgctggaaaagacttataagggttttgtccgttccggcgccaatcttccggccgacaaacaagcccgcctgcgcgaaatcaacaagcagctttccacgctcggaatcacgttcagcaacaacatcctgaacgaaaacaacgatttcaagctttatgtagaaaaagaagaagacctcgccggacttccccaatggttccgcgaaagcgccttggtcgaagcccgtgccaccggacaagaaggcaaatggctgttcaccctgcacaatgcaagccgcctgcctttcctgcaatattcagccaaccgcccgctgcgcgagcagatgtacaaagcctacatcaaccgtggcaacaacaatgacaagaacgacaacaaaaaaatcattgccgacatcgtaagcctgagacttgaaaaggcgcaattgctgggattcgattgttactccaactttgtattggacaatacaatggcaaagaattccgctaccgtgatggacttcctcaacaatttatggagctatgcactccccaaggcaaaagccgaagcagccgagctgcaaaagctgatggacaaggaaggcaaaggagagaaactggaagcatgggactggtggtactacaccgagaaactgcgcaaagaaaaatacaatctcgaagaagaagaaatcaagccctacttcaagctggaaaatgtacgcgaaggcgcctttgccgttgccaacaagctctatggcatcacactgactaaactcgagggcatccccgtctatcatcccgatgtggaagtgttcgaagtgaaagccgccgatggctcacaactgggcattttctatgtagactacttcccccgccccggcaagagtggcggagcatggatgagtaattaccgtgagcaacaagacggcgtacgcccattggtatgcaacgtatgcagcttcaccaagccggtaggcggcactccctccctgctgactatcgacgaagtagaaactttgttccatgagtttggccatgctctgcacggattgctaacccaatgccagtataaaggtacttcaggcaccaatgtcgtacgcgatttcgtggaactcccctcccaaatcaacgagcactgggccaccgaacccgaagtgctgaaaatgtatgccaagcattacaagactggcgaagtcatccccgacagcctgattgaaaagatactgaaccaaaaaacgttcaatcagggtttcatgactaccgagttgctggccgccgccatcctcgacatgaatctgcataacctgactgacaccgaaggtcttgatgtcgttgcatacgaaaaagaagcaatggaccaactggggctgattccggaaatagctccccgttatcgtaccacgtactttaaccacatcattggcggctatgcggcaggctactacagctatctctgggccaatgttctagacaatgatgccttcgaagccttcaaagaacacggtatcttcgacaagcaaacagccgaccttttccgccaaaatgttctggaaaaaggagacagcgaagacccgatgactctctataagaacttcagaggaactgagcctcaattagacccgatgttaaaaaatcgcggtatgaagtaagatttgtgaaaaaaaagctatatttgcagccttgtatgcaacagaatttaattaaaaagtaatcataataaactaaaagtaacatgcaaaacaaaggatttgtaagggtttttgcgatattgctcacactggtgtgtgtgttctatctctccttctcttttgtaactcgccattacacaagtaaggccaaagagtttgcaaaaggcgatgtgaaagtagagcaggactacctcgattctctggctaatgagaaagtgtattttggcaattggacgctgaaacaatgtcgtgagatggagatcagtttaggtttggacttgaagggcggtatgaacgtcatccttgaagtatccgtacccgatgtcatcaaagtattggctgacaacaagactgacgaagcattcaaccaagcattggccactgccgccaaacaagctaccacaagccaggatgacgtgatcaccttgttcgtcagagagtatcacaagcttgctccgggtgctccgctgtcacagctgttcgcaacccaacaattaaaagacaaggtaactcagaaatctaccgacgcagaagttgaaaaagtattgcgcgaagaggtaaaggcggctgttgagaattcctataatgtactccgtacccgtattgaccgtttcggtgtagttcagcctaacatccaaagtctggaagacaagatggggcgcatcatggtggaacttccgggtatcaaagagcctgaacgtgtaagaaaattgttacaaggttccgccaatctggaattctgggaaacatacacagcaaaagatgttactccttatctgcaagctgccgacaccaagttgcgtgccatcgttgcaagcgaaactccgacagaagaggcagacagcgcagctaccgaaactcctgccgtagcacaagctaccagcacagccgacagtcttgccgctgctttaaaaggcgaaaacaaaacacaagctgttgaccttgcgcagataaagaaagaacacccgctgttcgccatcctgcaggtcaaccccagcgggcaaggtcctgttgttgcttatgccaactacaaggatactgctgaaatcaacagatacctttccatgccggaagttcaggccgaaatgccgaaagacttgcgtctgaagtggggcgtatctccttatgaatacgatccgaaagcccagactttcgaactttatgccatccgttctacagaacgtaacggcaaggcgcctctggaaggtgatgtagtggttagcgccaaagacgaatacgaccattacggtaaacctgccgtaagtatgtctatgaacactgacggtgcccgccgttgggctcagctcaccaaacagaatatcggcaaaagcattgctatcgtgctggacggttatgtttactcagcaccgaacgtaaacaatgaaatcacgggcggtaactcacagattaccggtcactttactccggaacaagcaaaagacttggcaaacgtgttaagatcaggtaagatgccggctcctgcacacatcgtacaagaagatatcgtaggtccttcactgggacaagcttctatcaatgccggtatcatgtcattcatcgtagcattgattctgctgatggtttacatgtgctctatgtacggattcattccgggtatggttgccaacggtgctctggtactgaacttgttcttcacattgggtatcctttcttctttccaagcagcattgacgatgtccggtattgccggtatggtgctggcactgggtatggctgtagatgccaacgtattgatttacgaacgtaccaaagaagaactccgtgcaggcaagggtgtaaagaaagcattggctgacggttactccaacgccttctctgcaatcttcgactccaacttgacgtctatcatcaccggtattatcttgttcaacttcggtacaggtcctatccgtggttttgctactacattgattatcggtattttgatttcgttctttactgccgtattcatgacgcgtctgttctatgaccatttcatgagcaaggacaaactcctgaatctgacattctcttccaagatttcaaagaacttgatggcgaatgtacacttcgacttcatgggtagaaacaaattgtggctgaccactactggagttatcatagttatatgtatcgctttcctcgctacccgcggattgagccagagtatcgacttcactggtggacgtaacttcaaagtacagtttgagaataaggtagagccggaacaagttcgagagcttatttccagtaagttcggtgatgccaatgtcagcgttatcgccatcggcacggacggcaagacagtacgtatcagtaccaactaccgtatcgaagaagaaggtaacaacatcgactctgagatcgaagcatacttatacgaaacattgaaaccgttgctgactcagaacatcactttggaaaccttcatcgaccgcgaaaaccatacgggcggaagtattatcagttcccagaaggtaggtccgagtatcgcagacgacattaaggtttcagccatctggtctgttgtacttgcattgattgccatcggtatctatatcctgatccgtttccgcaatattgcatacagtatcggttcagtatccgcattggcttgtgatactatcatcatcctgggtgcctactccatctgttggggctggatgccgttctctctggaaatcgaccagacctttatcggtgccatcctgacagctatcggttactctatcaacgacaaggtggtaatctttgaccgtgtacgtgaattcttcggtctctatccgaagcgtgacaagttccagttgttcaatgactcattgaatacaactttggcacgtaccatcaatacttcactgagcaccttgattgtgttgctgtgcatcttcatcctcggtggtgattccatccgcagcttcgcattcgccatgattctgggtgttgtattcggtacactgtcttctctgttcgttgcatctcctatcgcatatctgttgatgaaaaacaagaaaggtactgaagcagctgtagaagtagccaaataaaaatttagacaaaaaactataaactaaaaagaggttgtgtcaaaacgttggcacaacctcttttatattttaagttctgctatattttcttttggctatgctactttttcctcatgcatttggcagcaagttgctatattccaattatatcgggttataaatagtcccataaacaaatatttggcaactgtaatgagcccctttccttcttttatctgtttagcacacatttttttgatattaaaggctatagcaaagaaagcaaagtccattgtaaccttgtcttctcccacatgccggaatcttctgtatgccatgttgtatttcatttgtccaaacacagcttctggttctatacacctcctgcctctatgcttgataccttcttctgagagcaacctttcccgtgcctgccgtttgtattgatttaatcggtggttgacttctataatacggttcccccgagctttaaaacaactgccacgcaaagggcaaccttcgcatctttttgctttataccgggcactttcggtgatgtatccgctcgctgtcttgtcacgtttggttcctatacggttcatgtgctgtcccataggacaaacgtaataatcctcttgggcattgtaatggagactttcggcatggaacgggttgggagtataacggggacgctgttctttatggaagtaattgtacttgatgaaggtttctatcccattctcctgcatgaaccggtaattttcttccgaaccgtaaccggagtctgccacgcagatattcggtaaacggttatagcggtactggaaagagtggaaaaaaggtatgagggtcagtgtatcggtagggttgggaaacagacggaagtctgtgataaattggttttcagtacctatttgcagattatatccgggtttggtctgcccgttcttcatggcatcttctttcatgcgcatgaatgtggcaccaggatcggtcttggaataggagttacgttctccaagggtatcaaggtgattgtcatattctatcagcttgtcacgatacccttcaagttccctgacctgcttcttctttttgcgcagggctttcttttcttccttatcctttgttgcaggctggcgttccagggcttctttaagttcatccactatgtcagagagcctgcaggaagtaaactccacggatgtgtcttttatagagttctcctgtgcaatggtttcatccacctgctccaagagaatacggattttatccattagtctcgtacggttccgttcgactgtcttgcgccagacaaaagtatatttgttggctttggattcaatcttggtgccgtcaatatactccacatcaaggctgatgaaacctttatcggcaaggacaaaaatcaactgggtaaatacattatttatttcctcctttacacggttacgaaaacggttgatcgtgataaaatccggatgctcattaccggcaagccaaatataatgaatgtcacgaaggaggtgcttctctattttacggcaagaatagatattattcatgtaggcgtagattatcaccttaagcatcattttaggatgataaggacaacggcccgtttccttataaagcttcttgaaactctcaagattgaggttgtcaataacagcattcacgatgcggaccgggtcgttcgcagctatgttttcatcaattctttgtggaaaaagaacggtttggttgggaatgtaaggacgaaaatgtaactttgccataacgaaaaactttatgcctaaagatacgaaaactttgggtaataacaaagcccgggcttgagaaagtctgggctttgcgcataaaaaaaggctgtgtcagcattttgacacaacctctttttgtagtctcgccgggaatcgaacccggatctaaagtttaggaaacttctattctatccgttgaactacaagaccttttgcatagattctgcatattgcagtagattgcgaatgcaaagataatgtattctgtcgattttccgaaaaaagttttgttaatccgattaactttacgaaatttgtcggtcagtgatagaatacagtaacccccaaaaattaatctatagtaattcgtaagttatggcaaacgacatgatggtcaaagaactggagcaagtggtagtccgcttctccggagactccggcgatggtatgcagctcgccggcaacatcttttcaacagtttcggctaccgtgggcaatgatatcagtacattccccgactatccggcagatatccgcgccccgcaaggttcacttaccggtgtttccggtttccaagtacatatcggtgctgagaaagtctataccccgggtgacaaatgcgacgtattggtagcgatgaacgccgccgcactgaaaacccaatataagtttgctaaatccactgcttgtatcattatcgatacagacgcttttcagaaatcagacctggaaaaggcggctttcaagaccgataatccgatagaggaaatgggtattaagcaggatgtcatcgccgcccccatctcaaagatggtgaaagactgccttgccgacaccggaatggacaacaaatccatgctgaaatgccgcaacatgtttgcagtaggtctggtatgttggctgttcaaccgcgacctaaagatagccgaagatttcatccgcgagaaattcgccaaaaagcccgaaattgccgaggcaaacatcaaggttatacatgcaggatatgattacggacacaacacccatgcttccgtagcccacacatataagattgaaagtaaaaccaccgttcccggcagatacatggatatcacgggtaacaaagctactgcttacggcttcatcgccgcagctgaaaaggctggcctgaagctgttcctcggctcctatcccattactccggcaaccgatgtactgcacgaactctctaagcacaagtctctgggcgtgatgaccgtgcagtgtgaagacgaaatttccggttgcgccacttctatcggcgccgcttttgcaggcgcgctggctgtgacctccacttcaggtcccggtgtctgtctgaaatcggaagccatgaacctggcagtcattacagaacttccgctggttgtgctcgacgtgcaacgtggcggcccttctaccggtctgcccaccaagtcagagcagacagacttgttacaagcactgttcggccgcaacggtgaaagcccaatgcccgtcatcgctgcctcttcacccacaaactgtttcgatgcagcctacatggcaagcaagattgcattggaacacatgactccggtcgtattgctgaccgacggctttgttgccaatggttccggcgcctggaagctgcccaaactggcagactatcccgccatcactcctccctatgtgactcccgaaatgaaggacaactatactccgtacaaacgcaatcctgaaacgggtgtccgctactgggccatccctggacaagaaggctatatgcacatcctcggaggtctggagaaagacagcaataccggtgccatctccaccgatcccgaaaaccataacttgatgtgccacctacgtgccgagaaggtggccaaaatccccgtacctgatgtagaagtgcaaggctgtgcagacgatgccgatttgctgattgtcggtttcggcggtacatacggccacttgtattcggccatggaagagatgaagaaggcaggcaagaaggttgccctcgcccacttcacttatctaaacccactccccaagaacacggaggctgttctgaagaagtacaagaaggtggtagttgccgaacaaaacctcggacaatttgccggttatctacgtatgaagatagacaacttcaccccgtaccagttcaacgaagtcaaaggacagccgttcgtcgttgccgagctggtggcagcgttcaataaattaattgacaattgactgttaactattgataataaccatgcgtaatatgcggattatcaatgaccaaccaccaattatcaactatcaattatcaactatcaatttaaaaagattatgtgcgaatatacagcaaaagactataaaaaaggacaacctcgttggtgtccgggttgtggtgaccacttctttctggcctcactgcacaaagcaatggcagaaatcggcaaagctccttgggagaatgccgtcatctcaggtatcggctgctccagccgtctgccctattatatgaatacgtatgcgatgcagaccatccacggacgtgctgctgccatctctacaggtgccaaggttgccaatcccaacctgacggtatggcaaatctccggcgacggtgacggtctggccatcggcggtaatcacttcatccacgccgtacgccgtaatatcgacctgaacatgattctgctgaacaaccgcatctacggtctgaccaaaggtcaatattccccgacctctccgcgtggtttcgtcagcaagtcgtctccctacggtacggtagaagatccattccacccggcagagctttgtttcggtgcccgtggccgtttctttgcccgcgcggtagctaccgatgctccggggacagtggaaatattgaaggcagccatggctcacaaaggggcttccgtttgcgagattctgcaaaactgcgttatcttcaataacggtacgcatgactccgtagccaaaaaggaagaccgctccaagaatgccatctacctgaaacatggcgaaccgatgttcttcggcgagaacaacgaatacggcctgatgcaggaaggctttggtctgaaagtcgtgaaactcggtgagaacggcattacagagaaggatatcctcatccacgatgcccactgcatggacaacaccctgcaactaaagcttgccctaatggaaggtcccgacttcccgattgcactcggtgttatccgcgatgtggaagctcctacttacgacgatgccgttcatgaacaaatcgaagaggtgtctgccaagaagaagtatcacaacttcgaggagttattgatgacgaacgatacgtgggaagtaaaataaaccactaagatttttgcataagttgcttccacacttccactcatctgccgaaatttcttatccaacggcatttcagatgctgtggaagcaactcaaaagtatggaagcgcattttgcttccacacttttgagttgcaatattaatagcttgtatcatttcttattaatattatgtttgcacgaaacaaataaggtgcaaacatgatattaatttcccaaaagtaagagtacctacctatcctttctctcacaaaccgcaggctgatggttccttcgttcgagtaatccttcccagataaaggtcaaaagcactcccaccctgaaaagaaaatgcaaccactgcaactgcaccagattttattacagcgatagaacatacctccgacgaacaaggctaccaataagggccgacaacaagacttcaagggaagagaaggaaattgtggaatacctactgtggattttttccacatctccacaccacaaacacccgaacttcccttttcccaattaaaaataaacgattgattatcaacattattcatccttgaaaggatagcttgcctttcgtttggcatatctcttgctaaaatatccgccgaaaggacgtaatatttataataagataaatcaattatttttcagtagtatgaaaatcaggatgagaaaacggtgtgacattccacattcagtgtcgcacttccaaaaaagtttgattattgcaagttggttattagcatttcttttcaccggaacagccttcgcacaagaaaaccgaaccattaaaggcattgtgagagatgtaacaggagaaccgcttatcggtgccagcgtcatacagaaaggtaccaacaacggcgtcattaccgatgtggacggcaacttcacactgaccgttcctgcagatgcaacactctctatcgcttacatgggctatgccacccgggagataaacctggcaaaacgaaaaaagcaaggcgacctgaagattacactcagcgaagatacccagcaactgaaagaagtcgtagtaacggcaatgggtatcaaaaaagatacgaaacgtgtcggttatgccatcagtaccatcagtgcagacgaattggtaaaggcaggagcacccaattttgcctctgccatgtacggtaaagcaccgggagtccgcattacacaaacacagggcggttctgccggagctgtctccatcaacgtacgcggcctgacctctatcactggaaataaccagccactcatcattctggacggggtacccatccgcaacggcggcacgggcaaaagcacggacttcgctgaatttggcaacgacggacaaatccgttccaatggtctggtagacatcaacccagaggacatcgagagcctcagtattctgaaaggagcttccgccacagctctctacggctcggaggctgcaaacggtgcggtagtcatcaccagcaaacgcgccaaaagtggcaagctgacggtggacttcaatgcccaagtcatggcaaacttaccggcttatctgccaaaagtacagaccgtatacgggccgggaacctacaacaccgcatacagcgattatgagaaacagacgggaggcttctatcagagaaccctaaacggacaaagctacaaaagcctccgttccaccaccttgtccttcggcccgaaatacgacggtagcgaggtactttactgggacgggaagatgcgcccctaccaggcactgaccgacaacccgtggaaagagttgtttcgcaccggctggacccagacttacaatctcgccatctcacaagggacggaaaccaccagcaaccgcttctcctacacattcatggacgagattcccaatgccttgaccggaagcttcaccaaacacaacttcaagctgaccggttcgtatcaactggcgaaaccgctgaaactggaatactcccttaactacatcgtacagaatgtagaagaccgtccgcaaacctcgctcaacctatacagcggtttcggcaacatgttctccaccttcctggacattccctatctgaaacaaagctacgtcaccagtctgggataccgtaatacctttgtcggaggaaacgccacgctgactcctgaggaatcatgggcctacgaccccagttacgccaccggagtgaacaacatgctgtggaatatgtaccatcaccatagcgacgagacagagaatcggctcatcggtatgattcgccccacctggcagataaccaactggctgagtctgcgcgcccaggtttcaactgatatcacagatgtgaagcaaacactgaaatatgaaagcgaacaacccaattccctatacgaccccaacggtagcttccagtccatcaaccgccgttacgacattgtctatggagatgttatgttgaacttcaactataatatcaaccgcttcgacattgccgccaccgtaggctggaccggacgctacgaaaatatgaacaatatgagggtctccaccaatggcgggcttgtcacggaaaactggttcgacctcaatgccagccgctacacgccaagcagtaccctgcaacgtatggaactactgaaaaccggctatatgggtacactgagcctgggatgggacaactatctattccttgaactgaccggacgccaggaacgctcgtctaccctaaaagaccagagctttttctatccttccgctaatctgagtttcctcttcacccaagccttccacatgccgtcatggtggaactatggaaaactgcgcctctcatacggtatcgtaggaaatgctcctgaaacctataccgccaatatcgtctacgagcaaggttcagacaacggattcacctggaacaccattccctcttcatgggggaatgcagatatccgtccggaaaagaagtacgaatacgagataggtctggaaagcaagtttttaaacaaccggttgggtatagatatatcctactacaacaaccgtgtaaaggaccagatactctccacgccgcaaccttccacatcaggcgtaaagaatgtgttgatgaatgtgggcgaggtagccaaccacggctgggatatatcaatcagtgccactcccatactgaccagagatttccgctgggacctgacagccaactatggtgtatataagaacaaagtagtgaaactggccgatggagtgccctatctggaaatactcaactccggaggcagtggaataaaaatacaagctgtggaaggccagccaatgggtgacatctatgcacaggttccccaggtgaacgaaaacggtgagtacctcgtttccgataaaggtctttacctcaaccaaaccgaattgcagaaagtcggcaacatcaatccggcaggcgtaggaggtctattcaactctttctcctacaagaatgtattcctcgatttcagtatcgacttccgcatcggaggagatgtcatcaacgaaatgaaccaatatgccaccgcagtgggtctgacacccgaatccctgaagtaccgtgatacggaacacggcggactgtcctattactatccgggcgacaacaattccagcggaattccggtacaagtagacccttccacgagtgccggccccaacggagagataatctaccacgacggcatcatccttccgggtgtagtggcctccactggcgaaagaaacacacgtatcattccggcaggctattactacaacaccacctataattggggaacggaggccgaacagctgacataccgccattcggtattcgacaattcttatgtcaaactgcgtgaattgaccatcggctaccagtttcccgaaaagatgatttccaaactgggactgggccggctgagtgtgtcggtcttcggacgtaacctcttctatttctacaaagcactgaaaaactacgatgcggagtcgtccgtcggaacatcctgggccaaccaggctaccgtgggaagttctaccacagctacccgcagtttcggtgtttcacttcgtgcaagtttctgacaaaacaaccatccaaaaaacaaaaaagagtatgaaaaagacaaagatattatctcttgtttcattgggagcattcctcctgacaacattaggctgtacggattatgacttcgacagcaaatacgaagacccctccaaagtaacccaagtcaccatcagtaatctgatggtaggagtcttccaaaaagtaaaggactatgatgtttacgaatacaaccggttcttcggattcgattcacagtttacaggcaagtatgcacaaaccttcggctactccaacactacagatatgtatacccccggctatatacccgccattgacggacagtgggacaatgtgtattcggcactggcccagttccgcaagctggaatctctctacaaagaagaaagcgcggcagagcaagcacaggatgaggcattctatcttgccgccaaagtacagctgtacgattttttcgccgccacagtggacattttcggggatatgcctttttcggaagcttgcacactaccgcttaccaacgatgtaggtaaatcgtatgctcactatgacaaggccgagaatatatataaaaccattcttgacgagctcaaagaaattgctccgcgattccgctccatccccacaccgaggaacttcaatacacaagactttatcaacaacggggacatggacaaatgggaacgttatgcaaactccttgcgactgcgccttgccatgcgcgtagccgcgcaaggagacttgcagacggaaggccgtaccgccatcaaggaaatcctggaaaatccgtcggcctatccgttgatagaggaacaagaaaacaacatcctcattgtcaaccagaagtctgggcaactgaacttcactgcaggccacggactgggtgactgggtaaccaaccgactcgcttcgggcgccatcatcgaccgcatgctgggccatggcaactacgatatgacctgcaatgacccactgagcggcgtttatgtgaaaggagaagacgacccgcgcatcctactcaacttcaatcccgtgaagattaccaaccagaacaccggtcaattggacgaacaccgttatctgggcacagaccttaccgtggcagatgagctgacggaatattacaactcgcaggcacaagacgaagtcaataccagcaacaccggtttctcacaaatcacgcagaaaggtttcttttgggaaaacgacaaattcgacatgctgataatggcctcacccgaaatccatttcctgaaagcggaagcctatgaaatggggtatggagtggcaaagaatgaagcaaaagcggaagaagagttcaaaaaggctgtcagccagtccatcacgctttactactattacgactcggtaagtacgggtgaaaacgcacgccggtataatgcccccactgccgaagaaacagcctctttcgctgctgccaaatggaacagcacggaatatgcagacaagctggatgctatcattacccaaaagtggctgcatttcggtttcctggccagtcgcgaggcatggagtgacatccgacgtaccggctatccgtccggcctggtcttccccgaagtagccggtaccatcacaaatgtgccgaaccgctggagatacccgaatacggaagtcaactacaatccctactataaagaggtgtcggccgaagacacttactaccacaaactgttctgggcaaaataaggactttgtttgcaaacccattttgcccgaagagtatatcatactcaccacagaataacacagattaacacagattgccttaggagttctgataataaagagtttttagcagtgttaatccgtgctatcctgtggtgagtatgtatttgccccctctgtttcttttattccgaacagtatccctccttttttagaaatcttaaggatttcccggtagggagattgcgggaaaccactgtctttaataaacgacggacaaacatcgcttccgcaaaaactgaactataacataacggactaaatgaaaaaatatccaaatgacttgattggcgacatcatgaaagccttcggcaaatatgccgaccgaccagcattcgtcatcgaagacacggcctgcacttatggagagctggcaacttgcgtacagaaaatatcctccctattcaaggacagagaagacaaaattatcggcatcgtcgcagaaaacagactggaaacatacgcatccatactatctgcactgatttgcggaaagacatacgtcatcctccatccttcctaccccaaacataggaacgacagaattgccgactcggcaggcattcgcctcgtgctgcataccgagaatatccatatcttgaacctcgacacccggaatctggaactgatatgtacctccgaaatagagcaggcagagaactccgccacgttccatgccgcagaagacatcctccatacggcagaagaggaaaatgcctacatcatctttacctctggaagcacgggcgaacccaaaggagtacccatctcccgccgtaacctaaatgctttctataccgcctaccaccgcctcgactggcaactggacgaaaacgaccggatgctgcagatgttcgaactcactttcgacgtttccatcgtatcctttctatatccgctgacgctgggtgcttgcatatacaccgtttctccggaaggcgtgaaatacatcaacgtaattgaaactctggaaaaatacgacctgaccttcgctgccgtggccccttcactgctccagctgctacgtccctattttccggagatacacctccccgcacttagatatctagtggttactgccgaggcttctgacgcggagctgttggatgctttcagaaaatgtgtccccaatgcctctttcataaacctatacggaccgacagagggaaccatctactgcactgcctaccggatacccgtcacctcctgcaagcatcacaacggcatgaccgctatcggaaggcctttcgaaggcatcgatgccctaattatggataacgacggtcgcccgctgcctaccggagaaaccggcgaactatggattagcggcaatcaagtgatgggtggatactggaatgctcccgaaaaaaacggggaatgcctcgtagagaccgccaatggaaaagtatactacaagacgggagacctctgccggatggatgccgacggtgacatcatctattgcggacgaaaagactcacagataaagatacaaggatttcgcatcgagctgagcgagattgaacatgtggcaaaaaactttttcaacggtgaatgccgtgtagtcgtcattcccaaatacgacaacggcaatcagtgcgaactacatctcgtcgtagagaagaaacagctcgacaaacagcagatggaggaatatctgtatagcaggcttccctactacatgattcccaagcatatgcattgcctggaacagtttccgctgaacaccagtagcaaaacagacagaaagaaaatacaagaactaatttaaacttgacaatggatacacagactattttgaatgaaatgagcctcatctttcgggaggtactgaaaagagagaacattgtacttgacaatgagaccaccgcccaggatgtggaaggatgggattcactgaccaacatgcaactgataaacaagatagagaagaaattcaatgtacgcttcaccttcagagatattgtaaaactcaaaaacgtgggagacatctgccatgccattttaaccaaaaccaactaggaaatgtcattcatatccctgaacttcgtcgtactgtttgcgtgtactttcattctataccatacgcttccttcacgattcagaaaagcgaccttactgacagccagctgcctcttcataggcttttaccacctcacttttctgataacggccctcatcctcacgcttaccaccttctaccttggcaaatggataggacagaccaagcgggaaagcagcatgaagggaatttatttttcaggtgtgtgttttctggtcgtgagctggttggcattccggtatgccgaccggcttacagactgccacatcctttttccgctgggaatctctttctatactttccaggccatttcgtacctgacagaaatctattggcaagaagaagaaccggaaaagagcctgcccgacttcatgatatacatgctcttcttcatgaagttcctttccggtcccatagaaagggcaggtgacatgctcccccaactgaagtcctgcaaagctacggactatgcatccatggtctacggaatgagactgattgtcgtgggactgataaagaaactgatactggccgactccatcgccccatacatagacggtgtcttcgggtcggtatacacagcctcaggcgtgcaattgctgatggcatgcctcctatatccgatagagctgtatgccgacttctccggatataccgacatcgcattgggaggagcgcgcatgctgggattcaagctcagcccaaacttcaaccggccgttcattgcacagaccactgccgacttctggcgccgatggcacatgtcgctttcattctgggtacgcgactatctgtacctcccgttgtcctcgagcctgcgtggatggggacaatggggcgtatttctaagtctggcgctgaccttcacgggactgggtatctggcatggtgccggatggaacttcgctgtctacggactaattcaaggtgtcatcatcttctacgagatgaagaccacgacatttcaccgcagactgaaagcccaattgggaagccgcttatatgccacattatccgtcgtaaggacctacctactttttgccgtatctctgatattcttccgggcaagttccatggccgaagcgttccactacatcagccacctctccttcggcgtacattacagttggaaggaaatgaacatcggaatgccggaccacaacagcattgtggcaggaagcgcactcgtactgatattggtttacgaatatttcatgtccaagcatgatttgctggaagccctcggacgacagccgacagccgtaagatggagtatctattatctgctcgccataatacttttcacactgggacagttcaactcggacagcttcatatatttacaattttgacaataaagacacatgatgaagaaaaacagcgaacggaacgcagccatacgtttcatgaaaaagctctttatcctttttatcccttttatagccctactggcagtctatttcctggacgaccctttcatggtcctgaagaactatgaacgatacgaccaaaccccggttgtactaaacgaagggtacgtggggtggcagatgtatctgaacaaccgggataccatccccatcgactcctatatcatgggaaactcctgcactatggcttatcaatgccatgaatgggagaaatacctccacggcggaagggccgtacggctattcggaaatgccgaaagcctcgccgccgtctgcctgaagctgaaggcactggacaaggcaggtgcaacaatcaagaacctgctgctgattatcgacaaggaatcattgcacaacgaccgctgcctgaccggacattccaacattctgccgcccgccatatcgggaataagcaacttcaagtttcagaaggaattctgccaagccttcttctacccgaactttctcttcccctatctggactacaagctgttccatacctatcgcccttacatgaaagggattataaacccctatggctccacccgaaacccggtaaccaatgatgtgctgaatcccagagagaaaatgataaaggaagagggagataagtactgggaaaaccggaaaggagaattcaccaaagagaaaatgaagaattatagagacgggaaataccgggaagccccccaagtgctcagggaaaagcaaatcagcttgttgcaggaaataaagtggatttgccggaagcataataccgatgtgaaaatcattatcagtcccgactacctgcaggtcaacataaaccctgccgacgtaaagacgctaaagcgcttcttcggaaaacggaatgtgtttgatttcaccggtatcaacgaatacacgaaagacatccacaattattatgaaccggggcattataggcccgcacttgggaaaaggctgatggaaaagatatatgaaccttatatcttgtcaccgaacgccaaatctccggcatctcccagcccgggaacgatataggaatgctcgttcatctccgggtcgattgctgcacaccacaaggtcacttcatctccagggaacagcttttccagatgctctacgccctgctggctggctatgacacaagctatctgcaacttggccggcatccccttggtgacgaaggccttccaggccaattccatactttctcccgtggcaagcatcgggtctacaatcaataatgtcttcttggacaaatccggagtagcgatgtattcgatgtgtacatccaccgtacggcattccttatccttataataacggtaagcggaaacaaaagcgttcccggcatggtcgaacatattcaagaatccagtatgcaaaggcaatccggcacggaaaacagtggcaatcaccacctcgtcatcgggtgtgctgaccgacgccacccccaagggagtctgtacctgcttgacagaatacgtcagttccttactcatttcatacgccattatctctccaatgcgttcaatattacggcggaaacgcatacggtcgccctggactgctacatcacgaatttccgccacgtattggttcaagacagaatttgtctcggcaaagttgataaccttcataactataaatgtgctaatgtgcaaatatgctaatgtgcaaatgtggtgtacgtaatgccgcatggcaattagcacattggcatatcagcacattagcacattaaaatctgctgcaaagtaaacgaatttcactcaatttgcaacattcagttagcagatattgttatggttttataaaagatttcctattagagaaaaatttctctaatagagcttttctttaaaaagaaagtattacttttgtaggcgaaaaacaagggacctgctgaaaagcaggaaaaaaagagcttttctacacccgttttcccttgtaaatcaaaggtaaaaagagattaagaaaagagattataaaccaaataccaacattttaaatcattaaaagaaatggcaaatttagatttaagcaagtacggtatccaagacgtgaaggaaattatccacaacccgtcttacgatgtactgttcgcagaagaaaccaaaccaggtttggaaggttttgaaaaaggtcaggtaactgaactgggtgctgtaaatgtaatgacaggtatctataccggtcgttctcctaaagataaattcttcgtaatgaatgaagccagcaaagattctgtatggtggacttctgaagaatacaaaaacgacaacaaaccttgctctgaagaagcttgggctgacttgaaagctaaagctgttaagcagctgagcggcaagcgtctgtttgttgttgataccttctgtggtgccaaccccgctactcgtatgaaagtacgtttcatcatggaagtggcatggcaggctcacttcgtaactaacatgttcatccgcccgactgctgaagaactggctaactacggagaacccgatttcgtatcattcaacgcttctaaggcaaaagttgacaactacaaggaactgggtctgaactctgaaacagctactgtattcaacttgaagaccaacgaacaggttatcttgaacacttggtacggcggtgaaatgaagaagggtatgttctctatcatgaactacaagaacccgttgcgtggtatcgcttctatgcactgctctgccaacactaatatggaaggcactgactctgctatcttcttcggtctgtccggtactggtaagactaccttgtcaactgacccgaaacgtctgttgatcggtgacgacgaacacggatgggatgacgaaggtgtatttaactacgaaggtggttgctacgctaaggttatcaacttggataaagaaagcgaacccgatatctacgctgccatcaagcgtgacgctctgttggagaacgttacagttgctgctgacggcaagattgacttcgctgacaagagcgtaacagaaaacactcgtgtttcttatcctatctaccacatcaataacattgttaaaccggtttctaagggtcctcacgctcaccaggtaattttcttgtctgctgacgcatttggtgtattgcctccggtatctatcctgaaccctgaacaagctcagtactacttcttgtctggctttactgctaagttggctggtacagaacgtggtatcactgaaccgactccgacattctctgcttgcttcggtgctgctttcttgagcttgcatcctactaaatatgcagaagaattggttaagaagatgaacaaggttggtgctaaggcatacttggttaacactggttggaacggtagcggcaaacgtatctctatcaaagatactcgtggtatcatcgacgctatcctcgacggttctatcgacaaggctccgacgaaggttattcctttcttcgacttcgtggttcctactgaattgcctaacgtagatccgaagattcttgatcctcgcgatacttacgaatgcgcttgccaatgggaagaaaaagcaaaagacctggctggccgcttcatcaagaacttcgctaagttcactggcaacgaagctggtaaggctctggttgctgctggtccgaagctctaatctgacaataaagttagaaacatatgaaaaaggtatctcctccgggagatgccttttttcttttttaatatctctatctcattgataatccgaaagttttagtagttttgcagaaaccattattcaaataaagcaatatgaaaagtatcagattgatgttggcaggcgcaagtttgttgctgttctgcagttgcggtgcccaagtccagaaagagacccaagttgccaatgcaaatgaaagcaaagagaatgcggtgattgaaaccatcatgtcacgccgcagtatccgccagtacaaaccgcaagccgtgaatcgcgacaccatgcagattatcctggattgcggtatcaatgcacccaacggacagaacaagcaatcgtgggaagtgcgtgtagtggataacccggatttcatcaacggcattacggaaatctacaagaaggaaaatcccaaagccgccgaagacccgaaattcaagaacatgtttcgcaacgcttctacagtagtatttattgccaatgacccgtcttatgacctttcgcagattgactgcggactgctgggtgagaatatgattctatcagcctggtccatgggaatcggttcttgctgcttgggcggtcccacgcgcttcatgacctctactccggctgctgccgaatacctgaagaaactggatattccggaaggctatcagctactttactgtatcgctttcggctatccggatgaaacgcccgctgccaaaccccgtaatgcggcaaaggtaaaattcatcgattgactttcgtttgaatgacgacaataaacaaggagtgcctcacctttcggcggggcactcctttcatatataacaactaaaactcttctgtttatcagttcttgtttgcgcgtttacgctcaagctcatcgaggataaccttacgcatacgcattgatttaggagtaacttccacgtattcgtcttccttgatgtactccagtgcctcctcaagagagaactgtacgggaggaatcagacgtgccttatcatccgaaccactggcacgcatattggtaagcttcttggacttcgttacattaatcaccaagtcgttgtcatgggaatgctcgcccactacctggcctgcataaacctcttcctgcgggaaaatgaagaatttaccgcggtcttgcaacttgtcaatggcataggcaaaagccgtaccggactccatggcaatcatagaaccgttggtacgccgttcaatctcacccttatacggttgatattccttaaaacggtgcgccatgatggcctctccggcggaagcggtcaacacgttggtacgcagaccgatgataccgcgcgacggcatgtcgaactcaagatttacacgttcgccggcactttccatctttaccatttcacctttacgacgggtcaccatatcaatcatcttgctggcatattcttcgggaacattgatggtcagctcttcgataggttcgcatttcacgccgtcaatctccttgaagattacctgcggttgccctacctgcaactcatacccttcacgacgcatggtctcaatcagtacggaaagatgaagcacgccacggccggaaacaatccacttgccgtcttcctcgctcttgcgcacacgaagagcaagattcttatccaactccttcatcaaacggtcgtggatgtggcgggaagtaacaaacttaccttccttaccgaagaacggagagtcgttgatggtgaagagcatactcatcgtaggctcgtcaatggcaatgggcggcaacgcctccggattttcgtaatcgcagaccgtatctccgatttcaaatccttcgatacctaccaatgcacagatgtcaccggaagacacttcctgcacctttacacggcccataccttcgaatgtatgcagttccttgatttttgatttcacgatactcccgtcacgctttgccaaagacacgttcatgccttctttcaatgtgccacggtgcacgcggcccacagcaatacgcccggtatacgaagaataatccagcgaagtaaccagcatttgcggtgtaccttccaactgttcgggggcaggaatattctccaagatacagtccagaagcggataaatgttatcagtcggctgctgccagtcggtactcatccaattattcttggcagaaccgtagataacggggaaatccagctggtcctcggttgcattcaagctgaacatcaagtcgaacaccatctcgtacacttcttcgggacggcaatttggcttatccaccttattcacaacaacaataggtttcagaccaatctgcagagctttctgcaatacaaaccgtgtctgcggcataggaccttcgaaagcatccacaagcagaatgcatccatccgccatattcaatacacgttccacttcacctccgaagtcactgtgtcccggagtatcaataatgttaatcttggtgtctttgtagttgatagaaacgttctttgagagaatcgttatacctcgttcacgctccaggtcattgttatccaacattaattcacctgtgctctggttgctgcggaaaaggtttccggccaaaagcatcttgtcaacgagcgtcgttttcccatggtccacatgggcaataattgcaatgtttctaatcttttgcatataatacctattattttcaggcgacaaagttagtgattttggattagatatgcagtatagatatgatttttttgctgaatatcattgtgatataaaagtttatccctatctttgcagccccgaaagggaatatttataataacttttaattaaacattatgtatttagacgctgctaaaaagcaagaaatcttcggcaaatacggaaagtctaacactgatactggctcagctgaggctcagatagctttgttttcctaccgtattgctcgtctgactgagcaccttaagctcaacagaaaggattatagtacagaaagagctttgactatgttggtaggtaaacgccgtgcgttgctgacttatctgaaggaccgcgacatcaccagatatcgtgctatcgtcaaagaactcggcttgcgtaagtaatctacttgcggcaaaaccatcaaaaaaggaagttttccaaaaggaaacttccttttttgtttataatccgatttatacctaattttgtatccatgaaaagaaaagtatcagcagcaaatctttcgatagcaatcacttttctattgatactgctatcattcggctttggttatcacagctattcgcaggcagaacaacgtgtggtctctgacctgaaccaggcactgcaacgcacagtattgcagaacaagggattatggttgaatgcggacaccatccaaacctatgccaagttgcaagaagtgatgggtactcccgtttccgtaagcggttcccacagagcctttaccgaagcattgtccgtcaccggattgaaagatgtctccacactttcgctgcatatactgaaaaagaatgctcccgccaccgtattcaatgaaattcctgccggatgtcttgccagcgacacattagtatggctctccaccacagccgatgcatctggactgacgctttctttccgaggatatgcccgctgctcagctgccatgctgttcagtttatccaagcagacaattccggcaacattgctattggccgccctcctctggggaggattcacctttttctatttccgtcggcgcacaaggactgatgctgatacttgtaacgggcaacagcaggaaaacaccatcactttcggcaacctttcgctttccctccaggaagcctgcttctataacgaacagcaggaaaagctaaaactcacccccatgcagtacacactgatggagatgttctacctttcttcctcacacctacttttcaaatccgacatctgccaatcgctatggccgggaaaagacaatgcagacgaaacgctttacacattgatacggcgtctgaagcccattgtcgaggacaacaacaacctcagaataacaacagatcgtggccgcgcctacggactggaaataaaaacctaaacattatagaatcatgaagactaacaaacttatcctattagggctaatctgcctgactgtcgcaatgccgacaaccgcccaaaaccgtaacgaaaagaaagcgcgcactgaacgtgctgtaaaagaagctattgctgctaagcaatacaaaatcaacgtagatcggatgcaaccgatgagaggcggtagccgtaacctgaccaccaactacacactggaaatcagaaacgactccgttttctcttacctgccttactttggagtggcctacaatgctccgtatggaggaggcaagagcctgattttcaatgcatccatcaccgcatacacaactagagcactcaaaaaaggcaaaatccaaatagacttcaagacccgtagtgatgaagacaattatgagtaccgcctcaccatctttcccgatggttctaccagtatccatgtgcaacccatgaacaaacagtccatctcgttcaccggagagatggatacagaaaagtaatcatcttccccctttaaaaggacaaaagaaagtattgtcagtctattgtcaggcaaatgtcagacaactatccgctttttgtttcttccatcccggcagaaagcggataccttcgtgtcccgaaatcaaacaacaaccggaacatgaaacagataatatgtattcttgccctgctcctaatgagcgtcacgacaacaaaagcacaaaccagcccgacaactccctccatccgaggtaaaattctcacagaggaaaagcaaccgatagatatggggcacagaacgaaacgtatattgagggttgggagaaaaaggcatcaaacctattgatatacaaaaggttgtgcaagatatgagtggatggctctgcaaaacgaaacgtttacgtgggtttaatttgcagctacatttaggtgctttttaggcatacagatttgcagataggtttaattgggtttacatagggcttacatggttgattcgggtgggggagtgcatggcagctgcggctgctttttttgtacctgatgatttgatataatattgcttaatttattccatataatagatatttggtatatttgtagcaaaatattataaactatggcaaaggtaatacatgtgcatttgacgcacggaatagaaggaacaaagcggaaagattggtatttcagcagcatttcggcggtttataccgtttttacagctgaacaggtgggtgcaacgaagaattatttgctgcatgcaggattgtccgggaacggtactatatgcaccaaaaaggctataataaagcaatctacgctcatttcttgcgggcgtagtggaaatgtgtcagacgaatagtaagcggccaaaaacgcaataaaaatggctttagaatgatccggtgtggggaggtggttatacctccctttttttgtgcttgaaatcggtcttttttgacgctggatattcaggtggatgttcaaagtggatattcacttttatagaactggatattcaaaatatggttttggcggtgtgcgatacagacgtactaaaatactataattttaaaaatacccctcgttttttatttgatagcccccccctaaaaacctatcatttttcacgctttagtttttaaatgccctaatatcagtgtttttatacccatatatgaaggtaggggagggggattgcttaggagggggacatcatggggggtgatagggggtacgcttcgtttcccatcaccggtgtatggtaacagtaaatccgcctacccgacatttgcagtaccggaaatgtgtgcatccgacacatgttttcccttttcgattgtcatttggcgaatctgttctttaagccttcctatttcttctgcctgctctcttattatagacaagaaagattcagtggtactattatttgtttcctcatgaagtatattgttttgattctttgcggctttaactgctttcaacttagcttgtgcttgctcttctgtcatttcccccttaataattggcaaatctgattcatagtaagtttcttcaattataggattcccttccccagtaaataaccatcgaaggttgatgaatacagaatatcctgacattataaaccttttaaaaaagtcatagcttggagcagactttccgcttactatatcatagatagtttgggctctactgtaccctaatgcattggcgaacttatttggattagtgtgcaagataaatataacttcttctattcttgcagatatttctgtatttttttctttcatatcttttgttattacaggattttctgtacatttgcagcgtgttcaaaaaagaacaccgcgccaaagatacaaaaaaggcgtgtgattagcgatttttaagtataagattatgaaagagacattattgatgaaagtaaatcccaagacgctggataacctgatgaacgaattaaccagtgccattattcagatgaaagatgtagaaccagtgcagaatacaagatttaaagatgaggtctatacaatgtgtgtatgttttcaagcagagctgctgcagaccattcggaatgtggaattaaagaatcaatcaagtaaagatactcaggataacccagcgtgacaacccggaaggcgttaagagacgggtgacggtgtggaaagacacacgggagtgcatggttcttgtgccggggttcgattccccggactccccccaatattaatcattaaaacaagtgagatatgaacaagaggtacattcacattacgaaagccgaccgcgactttatcgcaaaggcactcaacgtgacagagaagactgtttataacgctatccggtttgatgaccgtcgtggcaactccgaactttctgcaaagatccgtaagttggccatggatcgtggcggtattgtgatggttgttattccggaaatagaaactttccatgattatgacaatgtgatgcgtcagtactgtccgaacggtgccttgatagagcttgaccgtaatgatggtagcggtcaggtaatattcaagggagaaacggtgaagacttacgagcatgtgatggttgccgatattaaccaaatccaagcgtttgcatcggcattgagataggaggcggctatgttggtgtattacggtaacatacagtgtatttctgcacgtgagctcatagatggcggctatatcaccgaatcctgctacaggaactgggtgaaccgtggccgtatcaaggtggtgcgtcgtggtggaggtgctgctggaaattgcgcgttggtcgccctcaatagcctgcctaccgagtgtctggaacgggtgaaggaagacaaccccggtggaacagagcaggcacttcgccactggatactctcaaactatgtgctggatcaggctgcagtagcctattttttggattgggcttctcattcttccagcaacagagcaacagacgaacttgcccggaaatatgcggtgaatgcttccgtgttgaatacttgtatcaagctttataacagaaacaatgattaccgaaaactgatgggtgaaaaatataactgggacatgatggccaccaccatcgagaccctacgcgaagactttggtcatgatcttcctgccagtacccttcgtttccgcaagaaagtgaacgaatataagcaatacggttatgaatgtttgataaccggaaaattcggcaaccagaacaaacggaaggtaactcacatggacgaacgcctggtgatgagtttgaaagtacttcccaaccaaccatacggcagtgatgtgcatgaaatgtatctgtcgtttgtatgcggtgaactggaagtatgggatctggaaacaggagagatattcaatccggaaaactttacggataagaacggggaaccgaaagaactgagcgaaagcactatccggaacatactgaacaacccggcaagccagctgctgatagaaaaagccttgcgtggacgtatggaattctatcatgagcaaatgccgcacatgcaccgccatggtggtaagttctccctgtcacaaataacgatggatgacgtggatttgccgcgtcggatgaaaggcggcgagtatgtgcatgcctattatgcttatgatgtggtgagccagtgccgtatcgggctggcctacgggcgggataaggatgatgccttggtagtggactgttttcgtgatatgttccggctcatcgaacgcaacggatggggtattccagccggtattgaggtggagcagcacttgatgagcaagtataaagaaggattcctgaaggcaggtgaggtatttaagtttgtgcatttctgtgccccacagaactcacaggagaaatatgctgaagctctgaacggtgcgttcaagacaaccatagcacataagaaccatgaagccattggtcgctggcataacaaaggtgcacggcgggtggaccagaagaaagtgagtgacagcagcaaccacacctgggaagacagaaagtattatacgtttgaagagcttgtggcggacgaccggcgcgattgtgaagaatggaacaatacgcttcaccccaatcaaaagaaatatcccggaatgacccgttgggatgtgctcgtagccaaaatcaatccgacccttcgaccgcttgataaactgaccttgagcagatatatcggagaaaaggtagataccagtattcgtagaaattccacagtacgtgtggcaaatgcggactggtggctgagcggtccggaagtgctggagcagctggaaccaaacaaccgcaaggtgacggcttactatctgccggatgaagagggcaagcctacggatgtcttcctgtaccagaacgaccgctaccttgacaaggttcgtccggtagtgacttacaaccgggtgatggcagaacagaccgaagaagaccgggtagcctatacagagcaaaacaaagttctgagtcatttcagcaaatacctcaatgaccacgccatcggaaaggtgggaaccggtacaccggatcagccaacggatgacccggaagaggaactggaacttcccccggtggaactatccgatgatttgccagccgaattgtcggcagatccggaatcagattatgaatggcactccggaataagcgaggcaatgagggccatcagtgacatgtaagaatagaattagaacaacattaaaacagcgttagaattatgattacagaagcgcaaaaacagaagattttagcagcgatagccgccaaccgtgcgaactatcccagtgatgccaagcatgctgcctctttagccatcagtacatctgtgtacagtgcaatcaagaacggacagacagacaaagccctgagcgatgccaactggataagcattgcccgcaaattaggggtgaacctccgtggtgaaatggaatggaaagcagccaagaccccgacctttgaatatataactgcccagctggagttctcacagcagtccagtctgtcgggcatcttgtgcgacatgcccaatatcggcaagactttcacggcacgttattatgtgcaaagccacaagaatgccgtttatatcgactgctcgcaggtaaagacaaaattgaagttggtacgcaagattgctgcagagtttggtgtggacagcaaggggaagtattctgatgtgtatgaagacctggtatattacctccgttcgatggaaaccccgcttatcatcctcgatgaagcaggcgacctgcagtatgaagctttcctggaactgaaggccttatggaatgccactgagcgctgctgcgcctggtatatgatgggggcagacggattgaaagagaaaatcaaccggtccatagaatgtaagaaggtgggctataccgaaatgttgagccgttatggtgaccggtacagcaaggtgactccggatgatggaaaggagcgcgaacagttcttgaacaaccaggcacgtattgtagccaaggtaaatgctcctgcgggggctgatatagcccagattgtacggaagacatgcggtggtttgagaagagtctataccgagattgagaaacttaaaatgacagcggaataatgaagcgtgcgtacagtccgaaggaaatagccgccaagaaatgggttactctgccgtgggatgagaaatggagcaaacctttcgggttcccggcagagaacgcttcgtggttcatcagcggtgccagtgccagtgggaaaagcagctttgtgatgcaacttggaaaggaactgtgcaactatgggacggtgctgtacatgagttacgaagagaaaatcaaccaaagcttccaacggcgtatgggttatctgaagatgaatgaggtgcagggtaaatttcgtgtggtgacagaaggcagtctggaggaagtgattgccagactgaaaaaaccgaaaagcccgaagtttatcatcatcgattcctttcaggtggccggatgggattatccgcaggctgtggaactgatggaaacctttccgaagaaatgtttcatctggatcagccaggaaaagaaaagccagccgatgggtggcggtgcagtaagattgaaatatatctgtgatatgaagattcgggtggtcggttataaagcttattgtcaaggacgcgccattggagacccgggaagctattatgtggtatgggaagacggaatcattcaaacaagtaataatttaccaaaatgattatggataataacgagaaggcttttgaaagctacaccggaactgaagtgttccagatactgctggacggaaattccagccggtccgtattggatgactggctggagcgaaacatccaaagcgacttaaaagtgagaagagcgaaaatgcccggtcatgtcgtaatagaaacgggtgatgtcttgtttgcacgtaatgtgctgatatggaatccaagttgtaaagtaaacattaaaaagatttgaagtgatggaaaagaaagaagaaaagaaagtgtgctgcatctgcggcaaagagtatgagggctacggatacaatccgttcccggtgaaagaagaaggctgctgctgccaatcgtgcaactacagtgtggtcgttccggaacggtgggaacggcacaaggcttatcagcgcggtgaggcgaccggtgccgggaaggtgtacatcagcggagctatcgcgcattatgacatggatgagcgcaaggaagccttcagccgtgccgaggaggaactgaaggcacaaggctatgaccctgtaaaccctttcaggaacggattgccggatgaagctcattggagagcccacatgcgggccgacattgccctgttgctggcttgtgactatatctatatgctgaaggactgggaactgagcaagggagccaaactggaacttgacgtggccagttcgtgtggcattaaagtgttgtttgaataaaattagtcgatatgggaaaaataaaaatggaaaccggtgttgtggtgatgaagttgaccgctacggtatatagaggaacaattcgtgaaatccaatcctcacgcataggtttttgcggggagtacaataaagaaatactttctaaaatgggtgatgagttcaaaaagatatttgctaagcaaattgaggctgaatacaaaggtaaatcagtgaagccggataagataatttatcgtgtcagtaccaaatcaacggaatgtgaaatgattcttaatggtaaatgacatggcacaggaagtaaccaatttcgcccggttctacacattgttcaacaagcttccctgtacaggagaccgggaagaattcaagaaaagcattgtgctgcagtacacgtggaaccggacggacagtctgaaggaaatgacagccaaggagtatgaagcctgctgtacggctctggagaagctgagcggacaagacgaatggcgacagaagctgcgtgaggagctgcggcggaaacggagtctctgtctgaacctgatgcagaagctgggcatagatacatccgactgggcacgaatcaatgacttctgcagtaatccccgaatagtcggcaaagcgttcagacagattacggtggacgaactggatgaactggcggtaaagcttcggtccatacaacggaaaggcggcttgaagcccaggaaagaaaagcaaacgattaaccccgtgagcatggtatcactcattcagattgaccctgatgctccggcaaactgataggatatggaaaatagaaacacaaagattttagagaatctgaaaaaggaaatcaacctgcttgcctctgatatggagaagcaagatgcagccgagttttatagtgaattggctgactgggcatacgccaacggagaggctatgctgatggaagacgaacctgaaatgcaggattatgaaaaccaataaccccaaaaaacaagaatcatggaagaaatgaaacaaacgaccgtggtaatgacggcagaggaaaaggcggaatttgaagccttccagagagaaaaagcaaagaaagcggcagaggaaaaagccaagaatgaccgcgaaatgtacaaacagatggtggatgaggagatagcaaactccattccggtactgctgggcatcagtgagcagatcaaggcaagcaagcagactgtgatggacaacttcaaaaccattctggaaatgaaggcagaccttttcaagaccaaggtgaaggatgaccagcgcagccatacctttactaacagtgaaggcgacaaacgaatcacgctgggtgtgtatgtgaccgacggttaccgtgacacggtggaagacggtatagccattgtgaaggaatacatcgaaggtctggccaaagatgaaaagaccaaggcactggtgagcatggtgcttcgtctgttggcccgtgatgccaagggaacgctgaaggcttcacgcatcgtgcagcttcgcaaagtggccatggaaaccggagatgaccgtttcattgaaggtgtgcgtatcattgaggaagcctaccagccggaagtgagcaaacagtttatccgtgctgaaatcaaaaacgaaaacggaatgtggaaacctatccctctgggaatgacagaatcataaataatagaactatgatacaagaagtggagaaatctccgaaagtagccctgtgccgtgcttgctacggtacaggtaaagtaaagaaagttgtagaatatccctctcggatctttggaaagaagcgaagcgaaaccgttgaggaagtctgcagacagtgtgaaggaagtggccgggtaacggtaagcgcaaaaatgacgcttgacatccgtccctataaacctaaagtagaaccgtctatgaacgattaaacctatatgggaaagcggcacggagtcagttatcagaagcgtgtagtagaagtaaacaggatatatgaccattatgccagtcacggtgtaccgaaccgtgaaatatggcggcggtacatatatcctgtgtatgctattagtgagcgtacattctacaatatgcttaaagcgtccgcagaccctaaaaatgatttgccggacgatacggtacaattgaaatttaactttgactgggaatgaatgaaaacgtaaaaaaagtagtggcccggatactgaaagacattcaggtggaaatgagtgatgagtttgacaagaactttgaacggcaggcttttttcagtgagaaatggcagcgacggaaaagccccatccggaatgaaggtagagccatactaacagataccggggcgcttcggaaaagtatcggaagtcggacaacggaaaacagcattaccttctttacctctctgccctatgcggccattcataatgatggcggtgaaatagtggtgaccaagcggatgaagcgtttcttctggcataagtattatgaggcaaccggagcgttcggtagaagaaaagacggcaaacttcgaaaagacaaacgaaatgtccggcttgatacagaagccgatttttggatgttcatggctttaaagaaagcaggaagcaccatcaggattccccgacgccgtttcctcggcacatcgcctgaagtggaaaaagccgtccgtgagattgtagaagagaacctaacagagtattttaccattgaatataatatcataagaaaatgagaaaagaactttaccggatgctttgccgggagctgaaggccattgaccttatcaagcacatagacttgtggaaccataatgtggaattcatcgaacaggaagaaaactgggagcgtccggctgtctttgtggaattctgccctatacagtggaatgcgattgttcccggtgtggaataccgggcagaacctttgattaaactgcacatcgtgacggactgggaaggttcgagtgctgagggcagcgagctgcaggaggatgcgctgaaggtgtttgacctgtccggactgcttcatgcacagcttgccggattgagcggggagacctttttggagctggatctggtggagagtgataccaatcacaaccatgaggatattgtggaaagtatcgaggtatatcagtgtgtggccatcaagcggctgcaatagccgtctttattagacagaaaaagccgcggacgtacaaattaccgtctgcggcttttttgttcaatacaggcaaagtaaacgcaatcaggcagcctctttcttgtaaagcatcatatctgtgtaagaagagttgtaattcatgtgagcattgaattccacctttgtgcagttttcaaaaggattacctaaatccctatttttacctatccattcgcacagctccagaattgaagatttgttggatgtgaaatatacgtatgaatgccccttcagtacattcagcacatccagatagtctgccatattccagtacatgttataggtccctacgtcagtggacagatagggcggatcaacaagaaatactactccaggaatatctttataccggttgaatacttccttgtaatcgcaagatacgatttccagcccttcgagatagtccgtacattccgggtagccggtcttgcgtatattgttgtataaagcttccttccgcatatcctgaacagacagtttgtatttcatggaaaacaagatagaggaggagagggtaatgaaatccacatatccggtgctattctcttcctgctcgatgcggctgaatattcgttcacgcagttctcctttaatgattttatgacgtggtacggaattccctaccatttcgcgaatgtcagcaagcagctgattcgtttgcggaatgtgcttcatgcggaagcggtagttatcaaagtcattatagataacagtagagtggggcttgagggatttggtaatgtgagacaacaatccggagccaccgaacaggtcaacaaacaatgttccatccggatattgctccagcactttcatgaattccttggctaacatacgcttttgcccgacaaatgggagaggggctgacagatacatctttctcatacgttcaattcaaattttacattttcattgccggcaagcagctgttctgttttgtcgatgttgttttcgtaaatatgcacattccccagattcagggtgatggattttagtggcaactcaatctgtcttgatattagatacaaatgataaatatctgccggcagtcctaaattcgcatcgctgcttcgctgataggcggtcatgaccagttctccttgctctatctggaactgaacaagactaaggcatggagcctggttgctttctgttcctgtagatccgagaaacaatatatagtttttgctgttccttttttccctgtttatgcgttcgatgagtggcggcagtttttcaaaataggttgggtagctgttcacaaggatagagccgcagtagtcccaccagttgattccggcctccctgtatttttccacgtttcgttcgcccctcataaacagttgtaactcgttttttaacttcttccgcgctatggtatgcccctcgaatatatcaagaaggtcggcagggagcagcgtcagctgttcattcagtaggtagcggatattcccttttttattgctttgcatctttccggacgaaagcaccttgcctaagatttgataatacttgtccatgatatgaatgttatttattgcgatacaaaggtagggtaggggagtttgcctttagtgggaggaagtcctgattacactgcacacaaattgcagtcggttttaaaacgcttgatcaggtcatacacctttcgctcactgatgccatatcgtagggaaagcgtagctacgatataagacactttttcaccattggtctgcaacttgttatattcattatatagttctatatattgcacgtcatcgggtcgtatgcccatgtaatggcacgtttttaaaagctctctgttcaattttagtatctcaattactttcatatccagttaaatttcgtacatttgcattgtctcacttatcattgcgcagaatagcgcttacataaaaaagcctcttactggcgaacgagggtatctgcccccggtcgtgccggtaagaggtgctttatgtttaaatggtaagtgagacgactatttaacaggccgggggcttttttttatccttcccccgaagggattgtcaatcattcaatccgatataaatccaagttgaatacatctttccttttccatccttcagccagtgtgttttggatgtgtctgaccgcttgaatgtagaagtccttcagattatccaacttttcaaaggtatggtattcgggctgttcatccgaaccgaatttgaatgtaaccggaagggtctctccgcccgtctgaacggccaaatcgtatgctgccttatagttgtattggttctccgtagaaagccatacaggggcgccattataggcgaatccggataggatagctgcatcagtctggctgttataccatgacataaccaatgtgcggatttcctcatcagtaggcttgtgtccgaactcctcttccatgtaggaggcagagccgttctctttttcctgcacatcccagcggatgcgccatttgtctttaaccgggttcgtgcattccatcagcgatacaccggcacttccttcaactcttctcatgtaaacacgtatttggttctacctttgccgaatgtctctgtcttgatggtcgtttcaaacgggaaaccatccggcatttcctttacttgtgcgagaatattcttcatttcctcgctgttggtgaagaacttctttgcttcgccgttcacttcgatggccacaatacagcggtcttctccctgctcggtcttgataccggtctcaaagtccttcactacaatcggtaagtttaccagttcccggatgcttaccaccacaccgggaaatcgcttcttgccgtcctccggcttgtaagcgacattcaagtctttaaaacttctcatttctttgcctgttaattttttaaacaacttattacagtcggcgtgcttcgtcatgccgtagaaactggcaatcagttctcgccgtctttttctcgattttacctcgtgcatcttccgggcaaacttctgcttgatacgtttccgcaatcttacatagtcgggacggataacatagccaaggaaatcaatgccttcttctacagggaatacccgttcattcggctttatttccaagtctatttttcccatttgcctgtgaataacatcacgaatcttccacaattccgctttcgttttaccgagtaccagtccgtcatcgcaatagcgatagtaataacgaaccccgtacttatccttcagatagtggtctaaaaatacagacagaagcagatttcctgccccttgtgaactgcgcagtccgaagcttataccttccggcagcagcttaacaaaccgctccagtagcaccaacagcctttcgtccttgaacaccctccggaagcaccacataacaaagtcctgccgcgcattgtcgtaaaacctacggatgtcaaacttgtatgcgtaaagtgtgccttccgggtctttttgcaaatcggtacgtatgcagttcatcagatcatgagtaccgcgccttttgatgcttgcaccggttgtccggatataacgtttttgcaggtggcggtccaccacattcatgatggcaaacacagcgatgcggtctttcatggacaggatctgcaaaatacgttttttaccgtattcttcaatttccctctcatggtagccgcccagccggaatgaaccgtccgcaatggaagccgtcagttcggcgataatcttctccctatgggcaagcaggaatcgtccctgccttgacctcttacgaccggttccgcgaagtaccgaatcgaatgcctccgacatattggagtattcgatgatttcctcgataatatatccttccctgcgcataagctattggttaataaacatgaaagataagggccttcctttccccggatctgacttcttcgaactgataacagcctaccaaactccacccgacgcgtgatttttcagctttccaccctaatgggtgctgttgctgtggcttgcttccctcggcaccgcttcggggacacgtccccggtgctgtacgccgattaattagatttccagacgcgagccgatattcgcattcgtattcgaagcatcgttattcgcattcgcattcgacacaccgccattcgcgttcgcattgttgtacccgcgatagaccacacggactatcgggaagctccaccgggtacaaagttactgatttaacaggcaaaatgagctaaagcattacactatccaccaaaatagggccgacaatatgccgcctatgacggtaagagaccagtctatccagtcccaaagtccgcctttcagtttgtctttcagttccagacaggaggctgcgacagctgcagcatagagcgctgtccacggggtgaaggccaaaatgcctaccaacaaaccgccaataaggtgtttgtagcggttgctttgtttgagaaattcgataattttgttcataacgggttgtttttaaaaattgttttgtatatttgcagtgaggaatagcgttagatgttcagaacgggattgtagttcccggagcttgcgtctttcgctattctttcttttttatatgtttgtataattcacctccttctgaaagactgtgcagcgtgtattcgtgccagtcgtattcccgaactattatcagtgctttttcacctcttacttctatctcgaaaatgtgcgattgtatgaggtgtggaatacctttgtggttatctgctgttcccaggtatttggctttggcaaatacattctttatatccagaagcatgaggttcttttcatggtagaacttgtatggctggttggtccattcttgaagcgtgcgttttgatatgtttaccgggaatgggaattcattattcgtgataactgttccctgcaatggcttggcttgcttctttatctgtttggcatctgcattggccaatgttcttaccagtttgcatgcggcgcacaattcattttccggaacgaagaccagtttcatatttccgttgttcatatcgcaatccttacagcgcttgatggtgtatggattatagtcgggcatcgtcttttgttccatgcctgcattgaaccggaacattccctttttgtcaacttccaaagctgatttcccccttgccatggcctcttcgtggtctgtaggcggatacttggatttgcgtacctggaccacggaacagcggcagccccatccgttaggaggatagaattctgcccagaacgggtctgaagccgggagtgtgatgccggccatttctgcatgggtgggacgtacctttgcatccccggccgtgcggtactgtagataatagcggtcgccgtcctgcatgaaccgttcccatttggctgccatttcagccgaagcctgtacaaaggtgaattcagcccgtagatagtttgaattgtatgtttcgtcgatcttccggacatcattcaaaaagcgttcgaacgtctttctattgccgttttcatccaacagggagggaaaggcttcattcagttcatggaaggtcttcaagccggagaatacatagttggaacgctccagccgcttgcgcatggtctcggacatttccacctttcggaatgaaccgttcaagacagaagaatgagcttctataaaatcctgcgcttcttcggatgccaggatacctatttcaaggtttgccccttcttgccggaacagcaccttcatcatgcggtcaaagcgttccgtgagcttgtcgcgcatgagttttgcctcgtcctccatggagaggcatagtttctgtttgcccaacaggtgggcataccgctggtgcagccccgaataatcatcggggctcagtcgaaaaaacgggacagcgtttcagccggtttgccgtctttcttttttttcggttctgtcgggtccggctcttctttcggttccttctcctcgcacgggataccgtatttttcctcaaagtactgaggctttaccttgtagtgttgcagtaccatttcctcgtaagctttctgctgttcgggcgtgtagtcaatggagtagtcccaatcgaagcgcagccctttaacagggaacccgtggcgcaccatgcgcggaatgagctggttgttcactatatcccgaagcatatcacagtcgctttccacgaggttctggaacacttcaaggtgcgtttccgactgtgataggctgcttccgtcctcgatggtcatcgtctgcccgatgataagctttgacagttcggagttggcccgatcgatacgcttgtcatagacattgaatgcgtcccccttgccgctttccacaaattcgatttcggtttccattcctgccaccatggagagggcggttccggcttcacgcaacatcttgtcgagacggtcaatctctttctgatcgcgcgaagtggtgcgtgctatacgcatgggcattccgaatatttccccgaaggtgtcccaaaaggccagcatgttctttttgggaatagtctgtgaagcagccttgagatacagcccgaggtcgtcgggcctacctgcctcaatgagccagtcggaaaaaggaggctggcggtagtctatacctgtagtccagtcctgcccgaggtcggtaatgacacgcccatactcaggaatgacatgtttgcgcggaataagcttcacatccgaataacagatgcagccgtcgccgtcagtgcaaaggtcgcccaattcgatgagcgaatgtccccagtagattgaatcaagtgcatagcgcatgagctgcttgaaccaggactggtcaaagaagtgaaccgcttcctcgttctcatcccctttcatatccacgattttgaaagaacgtgccatgacaaaacctctgcgctgctccacacacccggagaggtgaaggtctatttccgcgtcccggtagatgtcgtacaggcgctggcggctgggactgtccacattgatggcatactgccaggcatcgcgccagttcttgatgtccttccgggtgagtgcatcggtggtgcgttgcaggtcgatgaccattttctgcacccgcttgatgtctttccccttggccagattaaaattgccgtatggcgtttgcagtacgtttttcggtttattggaaaacataccgctgaaaaagtctttaatatccataatcctaccagttatgatgaagctgcttctgacagctgtaaacaaatgaatttccggacggaagcccatcttctccgacagccaaaggcaaatcagggacaatttttccggcctgtacgccttcaagccacttgatggcccgttcataccgttccttgcgtatctcgcttcccatcttttgcggcatggctgcactcatgtggtaaagtgaaatgtcgcaggtgtacatgacaatgaggcggttccgatgttcatcctgtgcagagaaaatggccgtacagtcgtatttcggccgtagataaccggcaatttcttcccgggcttccgcttctgcattggtacggttttccgggcttacctgcgagataacctttaatgcgttgtcgccgatgacaactttgtaatcttcttctgtaatgaacatgactttactttcatttagtgatgaacaatgccattttttctatatcccggatagtggttcccttgcggaaacggtggcggtgaatcagttcacagatgttccttttggggacaactttcagtttgccacccatatacaggacgtagtactttcttccgtagagcttggcgtacttgcaagcacgggcaacggcacgtttatagcgccatgcaaaaatcattcttttaatcagctgtatcatgttaccatatatttttggcggtcggccttttaccgaacaccggttgaaaactctcctgccttgaattgcgctgcagcatccagatggctccctcgtcggcatccggtgcatcatcgtgaatacggctgccacgctccagtgccaaggtctgttcgattccggtctgcatatccggcgattctttcaacttctcattgtagaatacgaaaccgcgttcccataatggtgacaccgcttcgatgcgctggagcttgtccggtttctttcgtttgtccggcatgatgggcagttggtatccacgcagattcccttctgcctcaaactcatccagaatgacatcctgcatgaagttcgcttccataaagaactggacggctgccgtatcacgtgtacgctcgtagaggtcgtaaagccaccgtaccattcctgaaacggtatcctgccggacgtaacagtctataaggtgcagttccttcccaatcttgccccaaaggcggcaagccttgtagtcgttggaagtggtcgatttgaaagaggggtcggtatagcagaccagcatttcatacttggatagcctgggcagtttcttgtaacgaatccagtctgcccgaaaaatagttccgtccacgatggggttgtgcatcatctccttttcccatgcccggtagcctacgaaatccctgtattcctgcgcctcttctttcgtccatttttcgcgccataccggttctccgttcttgtctattgccttgatgacggatacatgtaccccttttgtcttggtgagattggccagcaccgagtttttagaaatgaggttcccgaccatgataaaacgcccccggcccacatccagtgcaccaaaaagggcttctttcacccagtctgtaatgtcatgcacccgtttctcattgcggcacagttcgtcgtcatccaagtcatcgatgacgatgtagtccggacgtgcttcccggtctcgcaaaccacgtggagactgtccgcgtccgcaagccaggaatttcaccccgttggccgccttgaactccccatcctgccaggaggcattcccctgctgcttgccgaagtcggcaatgatgcgctggttatgttccagttctgcctgaatatctcccagcagacgtgtggctgagtcctcacttttgccgaccaccaccatgaagttgatgagacgtttgggctggaacatcagccacagcggaacaaaaatgtccatgtgtgtggacttggcatggccacgcggccacatgaataccgctttcaggttgggtgtgccttttactttagccgctgccgcattgtggaacggtgcattgtggatggtgcgtatgacttccccggtggttttgtcacgcaaggtgagaaagtgggggaagtaatattcacagaacgcggcatagttaccctgcagacgcagaatacgcctgtccttttgtgccggtgtctcgcccgcgagcaaagccgtatccgtgatggactgcactcttttacagtgttccttccactgttcgtatgcctgtttcttttccgctgctgttgccatagccgttttattttatgcccatctgttcggtgatatacagatcctggtacttgttgattgccctgaccagttccggagtcacttccgggtcgatggttgaacggtattcaatccatttggagaatgccatgaacacttcaatgacatccactacgttggccttcttgtctaacttttcaatcaccgccgaaagtttggccagtttgtccccgagaccagctacaagtgcagggtcgttcgattcgttgacttgagtaatgagtgtatcaatggtgagcaggagtttgttcaccagttccggccgggtgacgttctttgccgcccttgcctctttccatccgtcagccgtgcaccattttgagatggtgacgcgtgacacgtccactttctccgcaatttcagtctgttccatgccggaaaggaacagtgagcgtgcaagagattttttcttttcgatttctgcctttgtcatataataaagaatatagggttaaaggcaggcttcggagtcccttgcacctgcccgatttattcgcaaagttgtccgcttatcagcttgcagccaaaataatgtgcaacggtttcatagaagtgtgcaaccattgcacacttttttggcttcccggtaagtgctctgtaatattgcagcgccaatgcataaaggcgtggcatgagaaaatgagtaaacgtgtaagaatttcaaacgacagcctgaacagctacggaagccgtgtgttgacatcgggcatgagtgtggagcagtattgccgaaacccggtactgctgtacatgcaccaacgcggaaacgtgattggttatgtgaaggaccttcgggtagaggatggtgaagtaaccggggaactggtgtttgacgaagcgaccgacctcagtaaaagatgcaagaaacagtttgaattcggcagtctgagaatggtgagtgccggaatagacattctggaactgagtgaccagcccgaacatttgctgcaggggcagaccagcccgacaataaccaaaagcaagctgtatgaggtatcactggtggatgtaggttccaatgatgatgccatcgtactgatgaaggatggaaaacaaatcacattgggaaaggatggtgattgtcctttgccactaatcaataaccaaaaaacaacagaagaaatggaactgaaacttttggcccttcaattggggctgccggaaacggcaacggaggctgatgttaatcaagccttaaatgaactgaaagcagccaaggcagagaatgattccctgaagcaagaaaacgggaagctgactttggcccgtatcactggtcttgtagaaaaggcagtggtggaaaagcgtctgggagaagacaagaagatacagtttatcgaacttggcaagaaggttggtgtcgatgaactgaagaatgtgcttgatgccatgcaaccacaggtgaagatttccactgtattgagctatcagggcggcaagcagcaggcacagccgtccacctatgccaaactgagcgatgtcccgagtgatgcgctgcttgaaatgcgcgagcataacccggaggagtacaagcgcctgtacaaggctgaatacggcatgacctgtgaaatttgaaaacctttaaaatgaagaaaatgggaaaaattgtaatgcttttgacggcacttctgttcaatacgctgacaggtgtcgtgtgtgcttcggtattgggattctctccggtggccggagctgtgggaatgaatgcggtggcagcctttatgggaatggccccgcaaagtacttcaatactccgtgaaggggtttatacggaaatctggacaggggaacttgttaaggtgctccgtgccggactggaaggaacctggctgtcaggaatccccgaccaaagcagtatcgtgaataacgatgtgattcacctggtagaagttggtgtagatccggatgtcttgataaacaataaaacctatccgattgatgtgcaggctttggaagacaaggatattgccatcaagctggacaaattccagaccaaggctacgccgattacagacgatgagctttatgccatcagctatgacaagaccgcccgtgtgaaagagggacatgccaacagtatcaatgatgcgaagtttaccaaggcggcccatgcgctttgtgcgaacaaaaatacggaaactactccggtgcttaagactaccggcgagaaagatccggctacaaaccgtctgcgccttaccgtgaatgaccttgtggaaatgaagcgtgcccttgacaacctgcgcgtaccgtcagacggccgcagactggtgctttgccccgaccatgtgaatgacctgctgctgaccagccaggcattccgtgaacagtacaatattgaccgcaacagcggcaaggtaggtaacctttacggctttgaaatctacgagtatggcaacaacccgctttatactacagccggagtgaagaaggcattgggtacaacggcagaagccggtgaatttccgtgttcatttgccttctacaaacagagggttttcaaggcaacaggttctaccaagatgtattattccgagtcaaagaatgacccgttgaaccagcgtaacctgattaacttccgccattacttcatctgcatgcccaagaaagaggatgccggagtggtaatgatgagcggctatcaagcatgatgattatggcaaagttgaaatatctggtaatacactgtacggcaaccccggaggggcgtgaggtatcatcggcggacatccgcaaatggcatacttctccggttgcccagggaggaagaggatggaagcaggttggctataccgacctgttccacctgaacggaggcgtggaacgtctggtagaaaacaatgaggatgcacaggtggacccttgggaagtgaccaacggagccaaaggatataacagtgtaagccgtcacatcgtgtatgccggaggcgtggaaaaagacggtaagaccccgaaagacacccgcactggctgccagaaaaaggcactggagaagtatgtgaaggattttcatcggaaattccctgatgtacgcattataggacacaacgaactggcagcgaaagcctgtccgagcttcgatgtgcaggaatggttgaaagaaataggtattaatcaataataaaaccgggtggtatggacttgagcgaatttatgaacattatccttggcggcggcctggttggtacggtggcgaccattggctccttgcgggctactgtgagaaaagcgaaagcggaagcgatgaaggccgaggccggtgcagaggccatgcgcatagataacgccgaacatgccacccgcattttgatggaaaatattgtaaaacctctaaaagatgaattttgtgaaacaaagaaagaactggcccgcaatacgcgcgagatggcccgtcttagaaaagctattgatacagccggaaactgtcctcatcgtgacgattgccctgtgcttgacaggttgcgcgagtcaccgaaagagcatgaaccgggaagtccggacggaatcggcaagcgccgacagcgcgagcggaagccgacgggcgggactggtgatggcgggtataccggcgagttcggtgaagctgtctatacctgcggacagcctccgtaaacttcctgaaggtgccgtgtaccgtggcaagagcggacaggcgaatctgaccgtaggcagcgacgacagcgggaacatcgtggccgaagcctcgtgtgacagtctgcagcagctggtgctatggtatgaagaagagctggcgcgtatccgtagcgaaaccaagagcgaaatttcaaatgacgttcaaacggtagaaaaacgccctccgaaccggatgcggacgtttatcacaggtgtattggccggcttgcttgtcggtatgttattaacaatgaaactgaaaaaaagatgaacaagaatttcatgtacggcataggagccgtaaagtataaggatttcacaatcgggtatattgaaaagaactcgtttgacctgggcggcaagaaacccgaggccgcgaagatcgaggccgaacaggtgcagggtgccccggtgctggtcatcccacagagtaacggcggcatcgccccgacgttcaatgtgatccagatgaactattcgaacctgcacaaactgcttggcggcagcctgcattataagaaagaagatttggaaaagaaaactccgatcggttggacagccccgtcggaggtgcttgtcatgcagggaccatgggaactctccctcgtgtccggacagagcgtactgattcccaacgccacgctactttccaatcctgcaggcaagctgacccttacagaaacctccaagatagaggttacgctcgaagtggcgatgccggaggacggttcgcagccttacggcgtgttcgatacggaagcaataccggacgagtgggggcagtacaagctgccgccggcggaagccgcggctgcagcatcgctccaaagtgaggagggctaacgtatggctgaccggctggaacaactgatagagatggagtgtgcggatgcgctgctggacagcggcgtgtccgttcctcttaaaaggtggaagcttccgtggctgaaacgcccggtggaggtgcgtgtgacgatgaagcgtccgaggctgtggggtcagattctgctggcgagggaatacctgaagatgggcgttgcgcccgggtggcaagcaaaggacaaggtcgaggaactggcctttgtagcggaacatggtaaggctgtgagccgtctgctggcctatacggtatgccggggatacgtgtcgcggcacgtgggcatcggggtgacagcgtgggtactgcggaactttgtggagtggcgttatctgacggccatgttccaaacattcgagcgtctgatgggcacgaaggattttatgcgtattatcagctcgacagcgcgggcgaacccgatgactccgagactgagccaggcaaggaaggggagttaagaacccggtatgagggttcccatagccctttcggcttcgtgtggcagattgcatcggcgaccggctggagcgtggattacatccttgatggggtgaattaccagacgctgatcatgatgctgagcgacgcgccgcggtatgtgcggaaaaagcaaggcggcggaaatggtgctcccagaccggaacacagcgccgaggatgaagcgaacgatatagtaggattttttcaaagcaaactggaatgagcaaacctgtagaagttgaatttttgatgaaggacaaactcacgcccggcatgaacaaggccgagcgtgaggcgctggaactgcgtaataccgtcaggctgctggaggctgaactggaaaggctgcgccttgccggggagacggctgcccccaatctggaccagagtgccaatatcgcgcagatccatgcactggagaagcagcttgaggaattgcgcggcaaactgaaactgctgcaggaggaatcggaatccgtgcaggtcacccctgcagatgtacccaacgcgcagcgccagttgggcgggcttcacaacagtatccagcagatcgcccgtgaaatgccttctttggccatgggaccgcagatgttcttcctggcaatcagcaacaacctgccgatttttacggacgaactggcccgtgcccgcaaggaatacgatgagctgcagaagtccggcaagaagggcacaccggtatggaagcaggtcctgtcctcacttttttcctggcagacggccatgaccaccggcatcatgctgctggtaatgtacggtgatgaaatctgggattggacgaaaaacctgttcagtgccaaaaaaggcgtggatgaattcaacatatcactcaaggaaatgaccgagatagagaaggacggccgtgcccagatggtgcgtacccgcttcgaactgaaatcggtcatcgatgaaataaagaacttcaccggcagcaaggaacaggaaaaggcgaaggtggaggaactgaaccgcaagtacggggaatctttcgggtattataaaacactttccgaatggtatgatacccttatccaaaagagcgaggactatgtacaggttctgctgcaccagaccaatgtccagaaccttgtaaaaaaagctgcagaagccgatgaagaggtgaataaaatcaaggcgcagaaaccggaagaggcggaaagcgccatgggttttttcgggaaatggggacaatatatcatgcagtcaagcatggcagaatccgggcagttctatgacgcacaggctgccatcaagaaacatgatcaggaagcttatgacgtactgttgaaaaatgccgaaaacaaacgtgacggttatctgaaaaaagcggaggaagaggtaaagaaagccgcagaagcagccaaaaaaggaaatatcggtgggcatatcgaccccaagcagtccgggaagaatccggaagcggaagccaagcaacggcttgccacagagcgtaggctggcgcaggatcttgccgccctgcaggctgaaaaccggaaggaagagatagaccgcatgcaagccggtaccgagaagaaactggcacaaatcgaatatgactataacgcccggaaagaagagataaaccggcaggaagccgactggaagcgtgagaacaaggaagccggtctttctaccggagataacggacttacccgggagcaacaggatgaacttgaaaaagcccgtgcctcaaacaccgagtcaaggaaaaaagcggaggcggacgtgtacagggaagaggcggaagccatgcgtgactatctgaaggaatacgggaccttccagcagcagaaactggccatcgctgaagaatatgccgagaaaatccgcaaggcacagtcccagggcgaaagactgactttggaaaagcagcgtgatgcggctgtgcacaaagtggacatggaatcccttacccagaagatagactggggagcagcgttcggggatttaaccggcttgcttgcagaccagatgaagaatctgcttggcgaacttaagcagtatgtcaagacggatgagttcaaaaaatcaggagcagcggatcagcaggtcgtttacgatgccattgaacgtattcaaagcatgctccccggtggcaacggcacattggattttgcccggctgcaaacgcagatgcacgctttgggggatgccgtaacacgtgtgcaaaatgcagaactgcagcaggaagcggcattcatccggttgaaagcggcgcaggccgattacaacaaggctcttgaaagcggtaaccaggcagaaatagaacgtacccaaattgctcttcaaacggctcaatcgtccagcgtttcagctgacgaagaatacctgaacgccacctctgaaatgaaggcgcttgccggggaggtgaaaagtgcctcccgggacacggttgacggattgaacatggtatccaacgggttgcacggctttgcgagcggaaccttgcagggatcatttgaaggaatccagaacatgcttaccggtctttcaaaactgaatatcggaggcaaggtcggcgatgccatcagccggatgtccgaaaccctgtcaagtgccggagtcatcgggcagatcatatcggccattctctccatactggatttgctgaaagacggtattggcccgattatctcatcattgatagacaccattttcaatgcgataaccggaatactcgacaatatcctcagcggagacctgttcaaacagataggcggttcccttgtgaaaggtatcgggggattgctgaacacggtgtctttcggaggtttcaacaaactgttcggcatcggcgggaacgccaaggaagtgcaggcggctatagaccgtcttacagaccggaacgagctgctgcagacctcgatagaggatctgaccgacaccatcaagcagagccaggggacgaagagtgtggcggcttaccgcgacgcgtacaagatgcagcaggaaacgaattcgaactacctgcagatggctatggcgcaagccggctaccacggaagtcaccacagctggaactactactggggcggtttcaaccaggcacagatagacaaactgagcggacagatcggccgccagtgggacgggaacctgtggagcctgagcccggaggaaatgaaggcactgcgcagcaacgtggatatgtggacgcaaatccagaataccggtaagggaggctatggcgggcgactgaccgagaaactggatgactacatagaccaggccggcaagctggaggaactgaccgaccagctgtatgaagggctgacgggcatttcgttcgacggtatgtacagcagcttcatcgacaacctgatgaacatgaagtacggtgccaaggatgcggcggaggatatatccgagtacttcatgcgggcgatgctgagcaacaagatcggtgagatgtacagcgacaaactgaaaggctggtgggagaagtttggcaaggccatggaggacaacgaactgaccgaggcggaacggaacgcgctgatggaagagtacatgcagtatatggatgaagcccttgccctgcgtgacaacctggcggcagccaccggttatgacaagacgcagcagggcggtacgagccaaagtgcgaaagcgggcggctttacggccatgacgcaggaccagggcacgaaactggagggcatgttcaccggcgggctgcagcactggagcagcatggacgaccggctggaaagcgtggtggagaagatggacacggctgaagggcatctggcccggatagccgagaacaccggtgtgagcgccggacacctgggcgaactgaaggaagtgataaagaaaatgatacgtgacggactaaaagtgaagtgatatgggcaatatactgagcggactggtgctggtgaacggcacggacatctggacggaatacggcgtgttcctggtggaagaccggcgcgggggcatggagaacctgacggccatcctgaccccgagcaaggccaagaaggatacggctgtggacatacgggaagagcacggggaaaaatacagccccgtgctgaccccacggaatgaagcgcgtgacgtgacgctgcattttgcgctttacaacaagacccaggcaggctggatgaagcagtactttgcctttgtgaatttcctgaagcaagggaaggacggctggctggagatccgtttcccccagctggatctgcagctgcgggtgaagtatgccgactgtacgaagttcaccccgctgacctatctgtggacggaaggtgtgcatgccggaaagttccgggtaaagttccgggaaccgaaaccgattatataaccattcaaacgctattagaatatgcttctaacgatatatgataaagccggaaccaagcgtgcggatgtggccgtgaacgacagctcgacgcaaagcaaggaagtgcagggagacaatgtgctttccctgtcgttcagctattatgccttcctgcccctggacgtgaacgactacacggactatctgggcgaacggtactggctgacagaacgctacacgccgaagcaggtgagcgatggtgaatgggagtataacctgaagctgtacggtatcgagagcctaatcaagcggttcctggtgctggagacgacggacggggacaccaaccccctgtttaccctgacggccacgccccgcgagcatgtggcgatggtggtgaaggctatcaataacggcatgggccacattactgactggaagacgggtacggtggaaggtacggagctgatcacgatagactacgaggggatgtactgcgacgaagcgctgaaagccatcgcggaaaaggcaggcggcaaggtggaatggtgggttgaggggcagactgtgaacgtgtgccgctgcgaacacggggaagaaatcacccttggctatggcaaggggctgacctccctggaaagagatacgagcaacacggccaaattctatacgcgcctgttcccggtaggctcgacccgcaacatcgatgcggagaaatacggcagcccgcgtctgatgcttcccggcggcaggaagtacatcgagcagggcgtggaggaatatggcatctatgaccattacgagcaggatgctttcagcggcatcttcccccgtcgggtcggtacggtgagctcggttcgcagcgaggaggtggcagacgatgaaggaaacaaattcaccgtctattatttccgggacggggaactggactttgaccctaacctgtacgagctggccggagaaaccaaacgtgtgtcgttccagacgggcgaccttgccggactgggagaaagcgatgaccactactttgaggtgaactacgacagcgcggcacgtgaattcgaactgatcaccatctggccctacgatgacgacacccagctgccgggcggcaagctggtgccccgagcaggcgacacctatatcctgtggaatatccggatgccggatgagtattaccggctggccgaagaggagtttgcggttgcggtggacgagtacaaccgggaccactggctggacattgccgcctacaaagccccgacagacccggtatacatcgaggagcacggcatagacctgtttgtgggcagacgggtgaagctggagagccggaagtatttcccggaaaaaggctaccgtcagagccgtatcaccaagatcagccgcaaggtgaacgaacccgggcagatggacatcgagataagcgatgcgctgcaggtgggcaagttcgacaaggtgacggacagcatcggtgcgctgaaaagctatacgaaatcaaagacggaaggcgctgcccttccggacatcatacgaagctgggacaagacgctgcccacggacaacaacctgttttccgcccggcgcagccagaaagagttcctgagcaagaaccagccggacacagccaaagagtccatccgcttcctgaagggtgtgagctttggcgaggctgctggcggcaagccctgcggcatcgtggatggtgagggcaatgccgaatacttgactgccgtgatccgcgaactgctgcgcagcacggagtttgtggacgggctgaccggtgagggctggcagctgtggattgaccagctgaccggactgacaaacctgacggtggacaaagtgactgcccggcaaagcctggtggcgctggaactgctgatcgagaaggtgcgcagcgtgtgcggccagctggtggtgtccgctgccaacggcaagatcaaggacgtggtgaagcagggcgacaactaccgcatcgtgtttgagcaggaatcgggctttgtggcccatgacctgatgcgctgtgcggttacgggtggtaagaaactaaaagcatactgggtggaggtggcttcggtgatagccggcggtgtactggtcccggtaagcgagtttggcggggtgaagccggaggcaggcgatgagtgcgtgctgatgggcaacaccgaaaccccgctccggcagaaccttatatccattgcggccacggaggacggacagccccgtatcgacattctggacggtgtgaaggccaagaacttcaacggctgccttcgttgccggctgggtaagctggacggcatcaggagcagcgctttcccggcagacaaacagccgaaaggaaacggcctgtatgccgacaacgtgtggctgaagggtacgttcgtgttgatgacgggcgaggacatcctgacgcggtttgagataaccgaggggaaaatccattcagccgtggaaagcttgcgcaaggaaatacgcgaagaacagagttatctggacaacagcagttttgccgacggcatggacaaatggaagacgggcagcaaggctacgctgttcaccctgggcggacgctggatctgggcgaacggcggtccttacggtacgaagccggacggccatgccgagatacggaccgacggcaaggtgccttatgcctatatccggaacagctatatcatgcagaaactggaggacttccggctggtaccggagtaccggcagacgaacagccagggcgaacgggtgcccggcgtggtgtatctgtcgttcagctaccgggttatcaaggccggaaggttgaaaatagaatttgtgaacgctgataagaccgggtttgagaacttcaacatgttcggccatgaagaggacctgcccgttggcggtgagaagatgttcacgttggacggactttggaacggcactggcgacttcaagctgtcgtttacgggcgtgatttacatttcgctgctggtgttcagcaccaacaaggcggacgcactggcctataagtaccgtacactgttcgaacagagcgaccggctggtaaagatttcagcggcggtcttcgacaaggacggtaatgcgctgaaagagaccgggcttgtcataaagcctgaaggttccggtctgtatgcgcaggacaatacaggaaagattgcccttatcggggtgagcgtggaggaagaggacgagtacggaaataccgtgagcaaaatcaagctgacagccgaccatatacagctggagggactggtaacggccaacggcaactttaagatactggaagacggcagcattgaaacgaccaacggtaagtttaccggagagatagacagcagcaaagggaaaatcggcggctttgagatagggaacggccgtatcggttctgtggccgactctcacgggagcggtggcggtcttgccatttatgatgattttttccgtgtcggcggcagcaaaggatatgtgatgttcggtgatgatgtgataccgtcttctgcaggaggagcttttaccgctgtcggtcgtatcgtgaactcagcccccaatatatacgggaattacggcttcgaccaagcgaactatggattgtttatagatgttaccggcggtacgaagaactacggtatcagcagcaatgcggcattacttgccccggcgtttatcaatacgaaagccaagctgcttaccttcggaagtggaaactacacggtggatttctcacaacacaatatcattttgatgtattacaatgaacccaactacagtaaggtagaggttacgctgccgtcggaaagttctgtggcatacaagttcggcatgagttacttgcctaccgattttgcagccattgtcacgttcagggtcagacccggttcaaagaatatcatactaaaaggtatctataaccacaatgaagatttgcaaaactacgagatggcatccggggactccgtaacggtacttattacaaaagcggacggattccgttaccagatattgaatcattcatcctaaaaaacagatatatatgaaaaagttagatttcaggaatttcagcgttcccaccggaataacccgtcagacgagggaggttttcgatgcacgtgagcagatagccgatttgctgtatacgcgtgtcagtggcatcaaggcccatcggcttgcgttcaagattttcgagagtaccggcgagaccgagttcagcgatgaggaaaccgggatgatacacatggcggtggaacgctattgtcttcccaatgtgatagatgccctgaacgaaatcctgggcgggtcagaaaccgataaaaacgaatgagtatggcagaaatgacacaagaagaactggttcaggaagtgctggaccgtgtactccagagttctaccggcgtggaggacttggagaccgtcacctcgctgagcggtgtgaaatcactgcccggggagaaggacggcaagatggtgaacgtccccctggaactgatagggaagcctgcgagcgatgccgccgcccgtgccgaggctgccgccaagaaagcggaaggagccgtagccggactggaggaaaagacccaggccgccacggaagcggccaccaaggccaacgaagcggcagccaaggcagaaaacgccgctgccaaggtggaacagactacggcagcagccatcggcggggctaccgcacgcttttcctcatggatggaaacaggcaacgttttacctgacaagagtaccaaaccgggcggcagcgtagtgtatgtagcggatgccgggaagttcgcctaccacatggactccaccctgtacggggactgggatgtggcgggtgtgcctcctgccggcatattcatgaatgcggaccggacagccatcctgccggacaagctctacctgctgggtgatgccgtatataccggaacaggcggcagcctgagactgctggcctaccggcatgaggtgatgagcggggaagcttacgaggcgctgcaggacaaggatgcgaatacgctgtatctgatttatgaggaggattgacgatgataaccataggcggtaaggaaataacggctgcgtatgtggggaaacgtgccctgtcggcagtctatgccggggcaagactggtgtggtctgcgataagcagctgtttcggacttggatactggaaaggcgacgagccgtggaacggatcggacgcatggaacggtagcagtaaaactgataaatgaatgattattataaaaggacagtattatggcaaaaaggaaaataagcggaatcatcaacgcgactgaacatccgatgaatcttgaaacaccatggaatcagaaacagccggacggcacctatcatgcctatgcaggcgatgacatcgaagcgttcctgaagaaggaactgtcaaaccgtacccctaccgaggaactggtgagcggcgagacgaaacctcctacatccggaacggtgttcgatgcgatggtgggtacggtgacggacgtggatgtgcaggacagcgaggacggcacccagtacgtgatgaccgtcaagcagaaggacaaccagggcggcgagagctcgaaggaagtgcgcttttccaagtacacggacgatgacaaggtggtggtgaacatcgacctgacggacagcggcggtgcgggacttcccgcctcgcagtatctggcactgggcagcggctttgtggtgaaatactccgtaggtgtgggcactgccggtggcggtacggtggacggctacagcgacctgaaagcccgcgtgatcgtgaaacgcggttcgaccgtcatcagtgagttccgggatgcggagtttgtgggcgttacagccggacagagctatacctttgacgcttcgccctacctgaaggatgccactgcctataccgtacaggtggaagcgcaggcaacttaccaggacggcacgctgatgaagacggccacggccaaggtgaccatggtggccatggagctggagaccacctactcggcgggcaacgggctggccgacgggggatataaaaatgacgtgaacatcccctttactgccaagggcacgagcggtgagaagaacatctactaccgcgtgaacggcggacaggcctttaccctcggtctttcggccggcagcggtgtgcagcagaagaacgtgaccatccccctgacacagatgcaggagggtacgaacgtggtggaagcctacgcgcagcatgagaactccggtgtggtgagccgggtgcattacattacgctgctgaaggcaggcggaggtgtgacagcgtatgccggcctgatgttcagccaccgggcagcggggttccagcgtgactggaaacacccggtgctggaggcagagcagttcacggcatggaacttcacgtatgccggctatgaccgcgatgcgtatacggcccgtgtgaaagtgaccgaccggggcagcgtggtgaaggaagacctgctgcaacgcggtgagaccggcagctacggacggacgaacgtgaacgtggaaccgttggactaccgtgtgtcatgcggcgatgccgtgcttgaggtgcaggtgaacaccacatcgcacccggacattgaagccacgctggcaccggatgccgtgtgtacgtttgacgccttcgggcgaagcaacacggaaaacaacccggcaagctgggtgagcggtgacaagcgtatggagttccgggacgtgctgtggagcgtgaacgaatatggtgccggtagcggctggcacaaggaccgcctgctgctggccggtggtgcaggtatgaccctgaccgctgacggcggttaccgccccttcaacgaggcggacaagcccgagggatttgccatccgtgacgtgggcatgacgctggagatagaatacagcacggccaacgtgacggatacggatgccgagctgatcacctgcctggggcagctggacaacggcaaccggtacgggctgattgtgactccggaagaggccaagttcctgaccggtgtggtgaccgaggcgatggatgccggacaggtgctgcgctatgaagactcggtgggtaccaagttccagccgggtacgaatatccgcattacctacgtgttctatccgaacgtgcagaccaacgaacagcgcacgctgatcggtttctatgtgaacggtgaagagtcggctgcttccaagtggctcgacaaggtgaattttgacattcagagccagttggaatttaagtcggcaggtgccgacttgaacgtgaagagcgtgcgtatctataacaaggcgctgacctcggacgaggtgctgaacaactacatcgtggaccgcaaccacctggaggatgccgacggggaaccgggcgtgcgctcactggatgaggacaaccgcgtgctgaatgaaggagatacggtgagcatggagaagctgatggggctgatgaagaagcgccggaactcgatcctggtactgataggcacgggcagcgtgggcagtgaggttccgagcgagagcgacacgctgaacgtggtggatgcactggcccagctgaacgacaagaaggccaataaactggtaagggaggtccgtttctataacggagaggacaggacgcttgactttatccttaccaacgtatatgtccgtattcagggtacttcttccgtgaactatgccagaaagaacttccgtttctacttccagaagacggcaagcggctggacggttacattgagctacggggagattgacggaaacggcaggcagaagaatccggtggtaactaccggcaaaaaaaatctcttcaagttacgcaggaactcggtaggcgcgaagctggcatgttccaaatgcgacttctcggactcgtccatgaccaccaataccggaggtgcgaagcttatcaatgacggactgaaagagatggggctgcttacgcctgcccagcgttacgccaaagaccatgggctggaggatgattaccgttcggccatcgacggcctgccgtgcgacctgttcgtagcgaagagtgccgacgaagacctgacctattacggccagtacaacatgaacaacgagaagagcgacagctaccccatcttcgggcaggatgagaccatcggcggcgagaaatggggcgagggcgacacgctgaactacctggaagccgacgaggaaggacacaagcagtacctgcccgtctgcttcgagacgctgaacaactccaatccgctgtgcctgttccactggttgccgagtaccgaaccggagcataaggatttcatggactacaactttgacggaggactggaatttaatcatccgaaagataccttctggtcggacggaggcggtgacgcggaggaagaaccgaacctgaaagaccacctcggtaccggtgacaagtacgacaagatgtacaaggccaccgaccgcatgatgagtttcgtctaccggtgcgtaaaggaaacgcctgcgggcaggaacatggtttacagcacggaatcccattcgttcgagggggtggactatgaggacgacggcgacaagttccctaccgccaagtggcagagcgatacgttcaggaaagaggccgggaagtatttcgaccttccccacctgattgcctactatctgtacgtgcagttcaacctcggcgtggaccagcttgcgaagaacatgcttatccgcacatgggacggtgtgaaatggtcgattgactattatgacggcgactgccagctcggttctgacaacaagtcgttcctgaccgggaagtatgacgacaaccgccagacgaagcgcgacggggcttatgtgatgcagggtcataactcgtggctgtggaacctcatcgtggccaattgctgggacatgattgtggagattatggtgagcggatggaacgggggcgcaagcttcatgagtgccttcagtatccagaaagccattgaccatttcgataccgaacagatgaagaagtggtgctcacgcctctataacaagtccggcatcttcaaatacatctacccgttcctgaacgaaatgccggtgggtgctgacggtgccaaacagacctatccgcaaatctacggtctgaagggttcgttgaaagcacaccggaactacttcatccaacgccggtatgacctgaagcaggtggagtacggctatgtatccacgctgggtgcccagttctaccagagtacggcatcgctggacaaggcttataaactgaaaccgatgcagtaccggctgaccatcccgtaccgtgtgcagctctccaccagcaacggcgtgcaggccgacagcggcgtggtggatgcggacgtgctccattccctgcagctgacccgtgccttcggtgagaacgacccgctgaagattatcggtgcagccaaaatcaaggagctggtatggcacgaggatgcgttcgcaatcggcttcaacttcggtctgctgacctcactggtaaaactcgacatgagcgtggagaaagccagcggttaccggaacggctcgttcatggcttcgaccaatggtatgctgcttctggaagaagtgaacatgcggaacaaccggctggcccggaacggggacaacgggaatgtggccactttggacttgagctggcagggccgcctgaagaaactggacgtgaggggtacggggctgacccgtgtgaaactggccaccggtgcgcccgttgtgcagttatgcctgccggacacgattgaggaactgttcctggaatatctgaccaagctgtccgatagtggcctgatactggaagggatcaataatgtgcggggctaccgctacaccaactgccccggcatcgacgggttcgctatgctggaacgcctgcaccaggccagactgaacggcagcggcaagctggagcgcttcgtgctggagatagaccgggaagacgacggaaccctgctgaagaagtattacgactacggaacgtatacacagacgggtgccgtggatgaccggcattcgggactgaggggcaagctgaccctgacgaagtatctggccgatgaggaactggagaagtatgccgcccgttatccggaactgaccatcaagcagccgccctatacgatgatcgagtttgacgacagcgtggccgacgatgccaatgtttcgaacctggacaacaagacggggtacaaattcggcaatacgtacaaaatgagcgggcatgtgaatgccatcctgtccaagcgccaccgcgtattggccaaggtgacgaagatgcccacgagccggaaggtggagatagccgggcagcaggtggaagtgaacaacccggacggggagatgacctatttccccctgcatgacgaaagctcgaacttctatgccgatgcggaggatatgaacgactgtacggtggcgaagctggacggcagcgagggagactggatgatgtatgagccgttttactggagcaaaggcatcaacgattatttgaacaacaagaagtacgcctgctacagcagttatccggaggacgaaatgcccccggtgcctgaggcgacggtactgacactggatgccatcaaggagacacagggcggctggctgggtgaacgcaagatcatgagcggcaagcccacgctgatggaatcctatacgacggacaaggcttattccgtgtgcaaagtggacgtgtcgggttacagacgtgtccgcttcccgagcgttccaggaacagggcttatcggcagtgtgtttgctgatgcggagggaaacatcctgaagagtattgtggtgccgaccatcggcttgaaatttgaagccggcatgtatctgatagcagacgttccggaacgtgctacagccctgcatttctccattctgaacacggcagagtttgactgcgtggtactgagccacagcgacaagatagaggacatggaaccggattgggtggccaatgaggagcatctgtgtgccgttgtgggcagttcggtggtgggcagtaaactgcgtgcctgcatcaccggagcttcgaccacggcaagcatgacctggacggacttccactactacagccagcagcggggtatgcagcagatagatgcgctgatgcacagccgcatcgcgaacctgagctatgcaaagtacgggcgcagggatatgcaggaacaatgcggtgccggtcagcataacaataaccgcacaacaggcggaacggccgaacacgggatgacagacaccatcggctacgatgaagcgtatgtcattaacaacaaaatcacgaattcgctgattgacggcctggtgcaccagtatgcctggtataagagtcgggacgaatacggacaggcgactgtggtgcaggtgaacaatatctgctgcctgggctatgaggacatctacggcaacaagtatgacatgatggacggcgtggatctgccgaacgacagcggtaacgtgggcaaatggcgcatctggatgcctgacggcagtatccgtatggtacagggcaagaaggacagcggtcagtggattacaggcgtggcgcacggcaagtatatggacatgattccggtaggtaatctgaacggatcatcttctacttactataccgacatgtactggataagcaccgctacggtccgtgtggtctatcgcgggtgcgacaatgcgagtgcgtatggcggtgtgtcgaatgcgaatgcgagttacgatgcttcgtatacgagtgcgagtgtcggctcgcgtctggccttccgcggcaaaatcgtccgggcgcaaagcgtggcagcgtacaaggcgatacgcgaggtggcgtaagcgcaaagcgccaaagcgtggagcgaagcgactaaaacgaaagaacgggattcggatggtttccgaattccatttaaaaggtattcaaataccggcgaagccggccgaatttttttagaatattgatagggtaggggaatacaaaactgaactgatttgagggtaaacgacctcaatttaactatgtaaagatagtgatttttgttgatatttgcaagttatttttctgttatttttagcttagaattgaccagttcaaatggaataaagagtgctttaaattatacgcttcgttttgtgaaatgaacttttcattttgaaacgcgcgaacatttcgatttgcggattatatagagtttgctaacatcgccctcctttccgaagattccaccttcatacaaggaacgtgtagccgaagcgacggtagttttgaacttctccctcccgctcccggaaactatctactacaaatttcttccatcggttacaaaaccctttgccagccttgccccaccgggagtacccacaactggatattgcaaaccgatgccgtgctacttgcggaaaccgtcatcaccgccgcccgtcccgttttccgactaaagggcggaaagttggagacaagcgtacggcaaaccctgcttgcatccttgaatgatgccaacgacgtattgaaacatatccccggactgcgctcctctgatgaggggtataccgtttttggcaaagggacaccggtcatctatatagacaaccgccttctgcaagacaactccgagctgcaacgcctctctgccgccgatattgaaaaagtggagctcatcaccaacccgggtgcagagtacgatgctaccgttaaagccgttgtacgcatacgcaccgtacgtaacaaaagagacagttttggcggtaatttccgtgcaggaatcacccaacggagacgcagcagccattacggacaagtcaatctgaattatcagaagaaaggattggccctactgggcatgctgtacaccaattatgaaaacagaaaacgccaccaggaggttcgctaccagataccgtccgaaatacaatgggatgtaaataaccgggttcacttatataataagggactgcttgccggaggaaaagcaagcgccagttacgacttcaccccccaacacagcctcggtgcctcctatgagtttcatcgtacccccgattatcacagcagtgatcattcgacatataccgtccgggcgaatgaagagttggccgatcacaccatacattcctctcaaaacttgcagcaaaccagccggcaccagctgaatgcctactatcaaggcagcataaagcaactctacataaacttcaacaccgacctggtatacggcaaaagttataatcaccaggaggctcaagaagaaagccagaccgaaggcaatcgcgacatcagctctttcaaccacgccgacaaccgcctttatgccgccaagttgattctgacccatcccctttggaaaggtgaactgaagaccggcgccgattacaccttcatccggcgaaatgacaatttcctgaaccggcagcacatacttcccgatacagacagtcgaatcgacgaaagcaagtccgccgtctttgccgaatactcactgacattaggaaaaatcagccttcttgcaggactgcgcttcgagcatgccgtctccgactattgggagcaggaagagtacgtgcccggtcaaagtcgtacttacaatgactggtgccccaacctatcggtagactttcctctcggcaaagcccaagccaatctcagctatacagccaaaagcaaccgccccagcttcttccagctacgtagcacactgagttataacaaccgtttcatctacgaaggcggaaacccgctgctcacccccgaaaccaaccacgacctgcagttcacggccctttacaagtgggtacaattcggacttaactaccaataccgccgcaatgccattgccttcatgaccaaagaatacgaggacaatccggatgttgtcatcttcactaccggaaatttcaaacggatgcagtatctcaccgcctctgcccatctgtcacccaccgtcggcatctggaaaccggagctcggcatctacttcgcccaaccgttcttcaaagtcaccaatcaaggcagtagcaagaatatgaaccgcggcagcatttacctctttctgcaaaacagtctccagcttccggacgagtggactctctcccttgatgccgactaccagagcgaaggcaacttcggcgccatgctgcaacgttcctattggggcatagacgccggcatccgcaaaacattcttcaacaaaaggctgacgctcggactgcaagtcaatgacctgtggaattcccggtatggctccttcatgctgttcggtccccggctgacctatacgaaaaaggcaaacccggactcgcgcagcttctccctgaagctaagctatcgtttcaatgcagcaggcaaagcgtacaaaggaaagcacgtatcggaacaagacttgaagcggctataaacagaactttggggaagaaagagaaacagaacagaagaatattatacaaataagccgaccaccggagatatttcagcaatattttccctcagaatgttgcatcaagtaaaagtttctcttatttttgcggtttaacagctataaattataacctttagacagaaaatactatcattatggataccagcaaaatcgtaggagaaaaaataaaatcactccgtgaaagccaatccatcagtatggaagaactggcacagcgttcgggacttgctatcgaacagattgaacgtatagaaaacaacatcgacctcccgtcactggctcccctcatcaagatagctcgtgtgctgggtgtacgtttgggaacttttcttgacgaccaggatgagaacggtcccgtggtctgccgtaaggacgaatcgcagaacagtatcagtttctccaacaatgccatccacagccgcaagcatatggagtatcattcactctccaaatccaaagccgaccgccatatggagccgtttatcattgatgtggctgctacagacgacagtgactttgtactctcctcacacgaaggcgaagaattcatcatggtgatggaagggaccatggaaatcagttacggcaaaaacacctacctgctcgaagaaggtgacagcatctattacgattccatcgttccgcaccacgtacacgcctatgaagggcaggcagccaagatacttgcagtagtttatacaccaatttaaattaatggaaaattgaaaggtgaaaatggaaaatgataaatactttctattttcacctttcaactttccactttcaacttccacatcatgttatacgaacgtaccctcggccaatggttggaacattgggccaaaacaacaccagacaaagaatatatcgtttactccgaccgcaacctgcgtttcacctggagccagttcaaccgccgggtggacgacatggccaaaggacttatcgccatcggcgtggagcggggaacacacgtaggtatctgggcagccaacgtacccgactggctgaccctattatacgcttgcgccaagataggtgccgtctacgtaacggtaaacaccaactacaaacagtccgagctggaatatctctgccagaactccgacatgcataccctctgcatcgtcaatggcgaaaaggacagtgactttgtgcagatgacctataccatgcttccggaactgaagacctgccaacgcggacacctgaaaagcgaacgtttcccctatatgaaaaatgtcatctacgtggggcaggagaagcaccggggcatgtacaacacggccgaaatacttctcttgggcaacaatatagaagacagccgcctgaatgagctcaaaagtcaggtcacttgccacgatgtagtgaacatgcaatacacctcaggcactacgggattcccgaaaggcgtcatgcttacccactacaacattgccaacaacggtttccttaccggtgagcacatgaagtttaccgccgacgacaagctctgcgtctgcgtaccattgttccactgctttggtgtggtacttgccaccatgaactgcctgacacacggctgtacggaagtaatggtggaacgcttcaacccgttggtagtgctcgcctccatccacaaggagcgctgcacggcactttacggtgtacccaccatgttcattgccgaactgaaccatccgatgttcgacatgttcgacatgtccagcctccgtacgggtatcatggcaggttccctctgcccagtagagctgatgaagcaggtggaagagaaaatgtacatgaaggtaaccagcgtttacgggctgaccgaagctgctcccggaatgaccgccacccggatagacgacctgttcgatgtacgttgcaataccgtaggacacgactttgaacatacggaagtaaaggttatcgaccccgaaaccggagaagagtgtcccgtaggcgtacaaggcgaaatgtgcaaccgcggatacaacaccatgaagggttactacaaaaacccggaagccacagccgaagtcattgatgagaacggctttctgcactcgggagaccttggaataaaggacgaagacggcaattaccgcatcacaggacgcatcaaggacatgattatccgcggtggtgaaaatatctatccccgcgagatagaagagttcctctatcaactggaaggcgtaaaagacgtgcaggtagccggcattccctctaaaaagtacggtgaagccgtaggcgctttcatcatcctgcacgaaagagtggatatgcacgaatcggatgtacgagatttctgcatcggcaaaatatcacgctacaagatacccaagtatatcttcttcatcaaggaattccccatgacaggaagcggcaagatacagaaattcaagctgaaagacttgggattgcaactttgcaaggagcaagggattgagattgtgtaataataaaggataaggatcaaggatggggttatgcctatattaaagtctatgcgaccccaataatcccttatccctaatcctttatccttaatccctaaccccttatttttcttctttttccggatatttcatattctcctctttcatctgttccaatacctcatgcaggtatttggcagactcccatttagccatcggaaggtcgtggagcaggtagttgccgcaatcttgcggagcggcaccggggacttcaccttcatattcggcaacaaagcggaaggtgtcctgcatcagtgtcagtatgtcctgcggcttcaagtcacctttcatcagcagataattaccggtgaggcagcccatggggccccaatagataatcttgtcctgccactgcgggtcgttgcgcaggtaggtggcggcaaggtgttcgatggtgtgtagagcaccttgtcccaaggcaggctcgcgattgggctctttcatacggatgtcgaaagtagtgactgtttctccgttcacttcatcctggcgggatacgtaaatgccgcgcaacaagcggatgtggtcgattgtaaaactgggaatcttcttcatgagttataagttataagttatgagttataaattgctgggaagggtggagaggaaggtccatatcgtgaggaacgaacgctctgccatggttccccagaaatcggcatactgcgaagcatggtcctctactccgggtgtgtcgctgatgatgcggaagctgagaaaaggaacattgtacagatggcaagtctgcgcaatggcggcagactccatatcaacggcaagaccgccggggaaacgttgcttgatggtatccagctccatacggttggtgatgaaccggtcgccggtacagactagtccgctgtggatgcggctttccattccggcttcgttcagcgacaaggcatgtctcaacagagagggacagccctcgtaagaggcggggaaaccttgtacctgtccgtactcgttaccgtcgccgcaccagacgtcgtgatacaccagacgttggcttgccactacatccgtcaccttcaggcaagcatcaataccacccgccacaccggtgctgacgatgcagtccggagaaaagcgccgtatcagttccgaagctcctaccgctgcactcaccttaccgatgccacattgcgtcaagattacatggttaccgcccaatgtaccttccacatagcggaaactaccatcgcccgacgtattcttatcctgcaagcgctccaccaaccggcggtgttcgctgtccattgcactgattatccctattgtcatatctataataatttaagcttgcatattaccattaaagcactttaatctttttttggaaaggcaaaggtacaacattctgccgataacgtgacaataacaatctgcatttatgtatctttgccacaaaagcgaagataggctgcacctcaacaaaactttttcatgcaagcatgaaagttctgtattcggtttgcactatctttgccccacaattgattaattgataactcataacttataactcatgaagaagcttcttcccgaccttattgccatcttggcattcgtcctcctttccttcgcctacttcttcccggcggatatagaaaaccgtattctctttcagcacgacacggctgcaggagcaggggcaggacaagaagtcaaggagtattacgaacagacgggcgaacgcagccgttggacaaactcgctgttcggcggtatgcccatgtatcagatagccccttcgtatgactccaccaagtcactgcagtgggtacagaaagcctaccaactcttcctgcccgactatgtgtgcctcacattcatgctgatgctcggcttctacatcctgctgcgcgtcttcggcataccggtctggctggccggactgggcggtatcatgtgggcattctcgtcctatttcttcatactgatatctgccggacacatctggaagttcatcacccttgcctacgtgccgcccaccatagcaggcattgtgctcgcctatcgtgggaaactgctgtggggaggcatcctcaccgccttgttcgtggccctgcaaatcacctcgaaccacgtgcagatgtcctattacttcttcttcgtcatcctcttctttgtgggagcctacttcgagaaagcatggcgtaccaagacattgccccagttcttcaaggcaagtaccgtactgattgtagcagccctcgtcggcatagccgccaacgtatccaacctctatcacacctatgcttacagcaaagaaaccatgcgcggcaagagcgaactggtgcagaccggcgacgctgccaagcagaccagtagcgggctggaccgcgactacatcacccagtggagctacggcatcgacgaaacactgactctgctggtgcccaacttcaaaggcggagcatccgccgccctcagccagagtgaaaccgccatgagcaaggcaaacccgatgtacagcagtctgtacggctcactgacacaatatttcggtacccagcccatgacgtcgggtcccgtctacgtcggagcattcgtcttgtttctgttcgtactgggatgcttcatcgtgaaaggaccgttgaagtgggcattgacaggagccaccttcttctccatcgtcttgtcctggggcaagaacttcatgccgctgacggatttcttcatcgattacgtcccgttgtacaacaagttccgcgccgtgtcctccatccttgtcatagcagagttcacgatacctttgctggctatctttgccctgaaacgcctgctcgaagagccggaaatcttaaaacaggaaaagaagcccctcggcatcagcctgctgctcactgcaggcatcgccctgctgcttgccgttgccccgggcagcatcggctccggctacgtgcccgcccaagaggcacagatgctgcagaatgccgtcaaccagcagatgatacccgccaacgagctctccggcatccttgccaacttgggagagatgcgtgccgaactcgtcagcagcgacgccctgcgtagcttcatcatcataggcatcggctgcagcctgctctggctctatgcaagcggcaagctgcgcagctcgctgaccattgcaggtatcaccatactctgcctggcagatatgtggggggtcaacaagcgctatctgaatgatgcccagttcgtgccccactccatccgtacggaaaccttcaccaagacaaatacagacgagctgatactacaagataccagcttggactatcgtgtattgaactttgccaccagcaccttcgatgacaacaatacctcctactggcacaaaagcgtcggcggttatcacccggccaagctgcgccgctaccaggaaatgatagagcatcatatctctcccgaaatgcaggcggcctacaaggccattgccaccgccggaggtgagatggacagcgtagatgccaataagttccgcgtactgaacatgctgaacaccaaatacttcatcttccctgcagggcagcaaagacaaaccgttcccatcctcaacccgcacgcctacggcaatgcatggtttgtaaacaaggtgcagtatgtgaacaacgccaacgaagagattgacgccctggacagcatcatacccacagagacagccgtagtggatgcccgcttcaaggatgtactgaaaggtaccacggaaagttataaagacagcctctccagcatccgcctgacaagttacgcacctaaccgcctgacgtacgaaacaaacaatgcccaagacggtattgccgtattctccgaaatctattatccggacggctggcacgtaaccatcgacggacagcctgccgaactggcacgcgccgactatatcctgcgcacaatgtatgttcctgccggacagcacaccatcgaaatgcgctttgaccccaccagcctgcacgtgacggaaggcatcgcctacggagcactggcactgctggtgataggtatcatcgtggcagtgctgatagctaaaaggaagtatgtaaaggcataaaaaaaatatcatatcattcccccataagcactcgacgcatgccgtatcagggtatgaatagcggaatgcgtcgagtgcttatgtccgttccgttatcccctcatgtttgttctgtcattcccttatgtctgttctgtcaacccctatatattgatgaaaaaccacggctgtgaagcatattcttcacagctgtggcatgtcttcttcacgactgtggaaaaggcgtaccacagccgtgcgcacatgataaacccaaaggcttctcaagacaaaccaccgtgcaaaacacaacagaagcctatgtaacacacaacggaagcctatgcaagagacaagaaagcccggtcagatgcgcaaaaaaaccgtttctaccctcccgggtaaaaacggctcaagtcaataatacatgaaaaaacgctatttagagagagtctcttctataacggaatggttctcttccttcttcactcatcatcagcagttctccgaaccgacatcaaagttagggaagcataacaagaacaacaaatagaatctacgaaaaggcatatctcatcgacagaacggaaaagaatgaaccctacaatagggaaaagaatgaaaaaaaagctataaacagtcggcagaacgatatatttcagtaactttgctaacgtgaaaacaggctgcaccccagcataaaaaaatgaacagtatggaaactaccagacaaaataaaatagcccgtctcctgcagaaggaactgagtgatatcttcttgttgcaaaccaagtccatgcccggcatactgatttccgtcagtgccgtacgcatcagccccgacatgagcgtggcacgcgcttatctcagtatattcccctcggagaaaagcgaagaaatagtcaagaacatcaacggaaacatgaagtccatacgctttgaactgggtacccgcgtacgccaccaactacgcattatccccgaactgaagttcttcgtagacgactcactggactatctggaacgaattgacgaactgctgaaataatgtcccttcccttctttatagcccgtcgctacctcttctccaagaagaaacacaatgccattaatatcatctccggcatttcggtgtgtggggtggcattggctacgttggcgttggtatgcaccttgtccgtgttcaacggttttcaagacatggtggcaggctttttcacagccttcgacccggaactgaaaatcaccgtccgcgaaggtaaggttttcgacccgcacgaagcgtgcatccggcaagtacatgccctgcccgagattgacgtgtggacgaaaacactggaagagaatgccatggtgcagtacaaagaccgccaggcaatggccgtcatcaagggagtggaggacaatttcgaacagcttacatccatcgacagcttgctctatgggacgggaaagttcctactgagcgactcggtggtggactatggttttctgggtgtggaacttatatccgagttgggcaccggcattcagttcgtggacccgttgcaggtctatgcccccaaacggaacgtacgggtaaacatagccaaccccactgcggctttcaaccgggagtatctcttctcgcccggcgccatctttgccgtcaaccagcaaaaatacgattcacgctacatactgacgtcactcgactttgcccgccgtctgttcaattatgacacggaagtctctgccatcgagatgaaactgaaacccggttccaacatcggctccgtacaaaagaaaatagcaggcattctcggcgaccggttcattgtacagaaccgctacgagcagcaggccgatgttttccgcatcatggaaatagagaaactcatctcttatctcttcctcaccttcattctgggtatcgcatgcttcaatgtcatcggttcgctgtccatgctgatactggacaaacgggaggacgtggagacactgcgcaacctgggtgccgatgaccggcttatagcgcgcatcttcttgttcgaaggcaggatgatttctgtattcggcgccctctccggcatcgttttaggattgttgctgtgctttctgcagcaacgtttcgggttgatttcattggggggaggcaatggaagttttgtagtggacgcttatccggtaagtgtacatgccacggatattattctggtattcttaacggtcatcactgtaggcttcttgtccgtatggtatccggtgagatacctcagcaagcggctgctgagaaaaagataaaaaaaacagttacttcttacggataatcgtcaatccgtcacgcaggggaagaatgactttctccacacgcgcatcccgcgccaccaaatcattgaaggctttgatactgattgtttgcaggtctgtgcgatggggttgttcttccagcacatggccatcccacaaggtattgtcggcaatgatatatccaccgccggaaaggcgggcgagcaccatttcataatactctatgtatttacgcttatctccgtcaataaaggcaaggtcgaaagtgaggtccagttgcggtaccagctccaaggcatcgccaatgtagaacctgattttatccgcgtaatcggaattctccagccacggacgggtgaagtcctcctgctcgtcgttgatttcaaacgtatgcagcatcccgccctccggcagtccttctgctatgcaaagtgcggaatatccgctataagtccctatctccagcacctgccggggacgaatcatccggacaaacatcttgagcatacgcccctgcaaatgtccggaagccatgcggggatatagcaacttgacatgcgtgtcgcgatagagcgctttcagataatcgccctcatcatcaatgtgctgcaaaatgtattcgtcaatcgtcactttgttaatggattataggttagggataagggataagggattaggggttagttctgcgcacaattattaattaatcattaaccgctaatccctaaccccttatccttaatcccttatcctacaaatatctgttactgttgggcaacacactatcttcagcatgtttcagggcatcttccaccacgttgatttcgaggaaagaagtgcgcgtaccggctttaccgctactcaggtagcccaccatgtccgtaggacataaacggccttccttcaacaagcggcgcaaggctgcaaagtaatactcctgcccgttggcaagttcgggcatatagatagcttccacaccgtaggaaagggcaaggtgccgcatggtcttttccttgtagcagatggccaacaccggatatttgccacggaaagcggcaaggttacgggcagtacggccgctgtaactgtcggtgatgattgcacggattttcagtttggtggtagcctttaccgcttgtttggccaggaacgcagtcacgtcgttgctgttctcgtccagcggaatacggatatcgttgtcagacagcttgtctttctccgcttgggcggcaatcttggtcatcgtcttcaccgcttctaccggatactttccataggcggtttcaccgctcaacatcaaggcatccgtacgataatagatggcattggcaatgtccgttacctccgcacgggtgggacgcggattggaaatcatggtatgaagcatctgtgtggcaacaatcaccggcttcttggcaagaatacacttgcggatgagcacacgctggatgcccggaatacgttcctgcggaacttcaataccgaggtcaccgcgagctatcatcacaccgtcggctacttccaggatttcatcgatattatcaacgccttcctggttctcaatcttagcaacaatacggatatcgctgttatgagcgtcaagaattgccttgatgtcgagtatatcctgcttattgcgcacaaaggagtgggcaatgaagtctatgttcttctcaatggcataaaggatattggtgcggtccttctccgtcagagaaggcagattgatgcggacgccgggaacgttgacgctcttgcggctgcccagagtagcctcattctgtacttcgcagagcagatagtcgggggtcttctctacaacgaccaactctaagtcaccgtcatcaataaggatatggccgtccacattcaagtctttgacgaaatggggataggataccgagatacattcacgggtagtctcctgctccgggttgcctaccaccttcacgcggtcgcccgccttgaaaggaatgggctcagccagaaccgtcgtacggacctccggtcctttcgtatccatcaggatagcgatgcggttggaaaccgaacgcacattattaatcaacttctcggcaccttcacggccaagatgtgcagtattcatacgtacaacattcatacctgcatcgaacaactgctttataaaatcaacatcacagcgctggtcagaaatcgttgcgacaatcttcgtttgcttcaataacataatctatatacctattttatttaataatcttttaatgcctccatggccagacggtaggagttcagcccgaaaccgagaatgacacccttgcaagcgcaggaaatcatggacacatgacgaaaagcctcgcgggcatgtacattagagatatgcacctcaatcactggagaagtgaccgaacggatagcatcttgcagagcgatggacgtgtgagtgtaagcacccgcattcaaaatgatgccgtccacatcaaaacccacctgctgaatcttgtctatcagctctccctcaatgttggactggaaatagtcaatctgtacatccgcatatttcttacggagttcggcaaggtagtcttcaaaagtaacgctaccgtaaatggaaggttcacgtttgcccaagagatttatattggggccattaataatctgtatcctcataacacaattttttatacctttgcggtgcaaagatagtgcaaaccgaaagcagatgcaaatttatttgcaatttgctgaaatgcagtctattttcgcgaagcaaaggtagaaaaaagaaatgaaatcagaagaaaaatccacgaataaggagaaacaaacgctgataatcagaaagtaccaccagtatctgaaactggaaaaagcactctcacccaatacagtggatgcttaccaaacagacttacagaagctgctgcactttctggaaggagagggtatcgctatccttgacactaccctggatgacttgcagcattttgcctccggactgcacgacatcggcatccatccccgctcgcaggcacgcatcttgtcgggcatcaagtcatttttccatttcctagtcatagccgactacctggaaggagaccccagcgaactgttggagggtcccaaaatcggattcaagcttccagaagtattgacggtggaagagatagaccgcatcatctccgccattgacctaggcacaaacgaggggcaacgcaaccgggccatcctcgagactctatacagttgcggcctacgggtatcggaactgtgcaacctgaaaatctccgacttgtatttcgacgaaggcttcatcaaggtagaaggtaagggcagcaaacaacgccttgtacctatatcgtcccgtgccatcaaagaaataaggaactggttcgtagaccgtaatggaggctggaaaatcaagaaagacttcgaggactatgtatttctggcacgctggggcaaaaacatctcgcgcatcatggtattccatcttatcaaagaactggcagagaaggccgacatcaccaaaaacatcagcccacacaccttccgccactcctttgccactcacctgcttgaaggaggcgccaacctacgcgccatacaaagtatgctggggcacgaatccattgctacaacagaaatttacacacacatcgaccggaacagattgcgcagtgaaatcatagaacaccatccccgcaatataaagtatcgcaaagaacgggaaattcattaaattatgataaaattactgcgagggttaacaaactgtaataggatttaatatctttgcgttgttatgttcatgcccaaacagcacactaacatggaatagacaaatttcaattacaaacaattaatttatacctaaaatgactaagaaattgtatctgccgtttttaatggcaatggttgttgcattaatgacatcatgcagcaaaaaaatgggtgaattgtcatctgattatttcaccgtaactcctcaagttctggaggctgtaggtggtaaagttcccgctacaatcaacggaaaattccccgaaaagtacttcaacaagaaggctgtggtagaagtgactccagtattgaaatggaacggtggcgaagctaagggccaatctgccgtattccaaggcgaaaaagtggaaggtaacgaccagactatctcttacaagatgggcggcagctacacgatgaaaacatctttcgactatgtaccggaaatggcaaaatccgaactgtatctggaattcaaggctacaatcggtaaaaagactgtcaccatccctgctgtaaaagtagctgacggtgtaatttccacttctgagatgctggaacaaacattgggtagcgctaaccccgccaacggtgacgacgctttccaacgtatcatcaaagaaaagcatgacgccaacatcatgttcttgatccaacaagccaacgtacgcgccagcgaattaaagactgccaaagaattcggcaaagaagtgaagaacataaacgaagctgccaacaagaagatcagcaacatcgaaatctccgcatacgcttctcctgatggtggtgtagacttgaatactacattggctgaaaaccgtcaggacaacacagctaaaatcatcaacaaagatttgaagaaagccaaaatcgatgcagcagtagacaccaagtatacagctcaagactgggaaggtttccaggaactggtatccaaatcaaacatccaagacaaagaattgattcttcgcgttctttccatgtatcaggatcctgaacaaagagaacaagaaatcaaaaacatctcttctgtttataagactttggccgacgaaatcctgccgcaactgcgtcgttcacgcctgactttgaactacgaaatcatcggtaagtctgacgaagaaatcgcaagcctcgccgacagcgatgccaagcagttgaacatcgaagaattgctgtatgccactaccttgactaaagatgctaccaaacaagaagccatcttcacaaaagctactcaaatctacccgaacgatttccgtgcttacaacaacttaggtaaactggcttatcaagctggtgatcttgacaaggctgaaagctacttcaagaaagctctctctatcaaggatgctcctgaagtcaacatgaatcttggtctgattgctttgaccaagggtgacaagaccgcagcagaaggctacctgagcaaggcttccggttctaaggagctgaacgaggcattgggtaatctgtatgttgctcaaggtcagtacgacaaggctgtcaactcattcggcgatacaaaaaccaacagtgcagctttggcacaaatcctggctaaggactacaacaaagcaaagagcacattggccgctatcgaaaagccggacgcttacactgactacctgatggctgtacttggcgcaagaaccaacaatacatctatggtaaccagcagtctgaaaaatgccattgcaaaagaaccggctttggcaaagaaagctgcttctgacctagaattcgccaaatacttcactaacactgactttatgaatatcatcaaataataaaggttagactgaaaagaacgtgcccggcatagaaatatgtcgggcatttctttttattcacaccaaaaagaagtattttcgcgacgaagtatcagaaaaagaaccggaatgaagaaaatctatcttgcataccttctgcttattatattgtctgcctgcggcagcaaaaacacgaattcagtccacctaagcggtgaaatcaaagggctggggaatgataccctttatatatatggtacggacaagttctataaccgtatggacacactgcttgtcaaggatgacaagttctctgcaaccctcaccaccgacacacttgcctctacatggttgcaattcagcgacggtacggaatatccgctttacctggacaaaggagacaacataaagataaaaggttctgccgccgagcttacttcactggaaatcacgggaaatgtccccaatgaagaactaaccgcctttcagaaagagttgaaaggcttgagtactccctcggagaaagcattggaagaaaaagcagaagccttcatcaacaaccatccttcttcactggtaagtatctatctgctggagaaatatttcgtgcaaaaaccgcaaccggacttcgccttaatcaaagaaatgacagcaaacatgaccggaggcttaaaagaccgtccgtatgtggacgaactgcttgatctgatccaagaagaagagaagatatccatcgggaaaactatcccttacgtcaacctgcccaatgccaaaggtacacaaatcagtcgcaccagctttaaagacaaatatctgttgatacatttctgggcatcttgggacccgcaaagcatggaagccaacgctgccctgcgccggatttacaagaaagaagaaaagaacaaactatttgccctctggggtatttccttggacatcgacagaaaggaatgggaagaagcaatcaaaagaaataccctgaggtgggaacagagttgtgatttctccggatggaacacagcgcccatcaagcagctcgccatacaagcattgcctgccaacctgttccttagcccttccggaaaaattgaagggaagaatatgagtgaggaagacatcaagaagaaactggaggagatagagcaaaaggaaaaagagaagaaagagagggaaaaaaaactcaaaaaacaaaaccgacggtagcctatcctgccatcctaacccctaatcactaaaaacgtgctcataaaagtttttggagcggctgttcaaggtattgacgcaaccctcatcaccattgaagtcaacagttccagaggctgtatgttctatttagtcggtttaccggactctgcggtcaaagaaagccatcaacgtatcatatctgctttgcaagtcaacggttaccggatgcctaccagtaatatcgtcatcaacatggcaccggcagatatccgcaaggaaggtacagcttacgatttacctttagccatcggcatacttgccgccagcgaagttatccagtccgataagctggaacgctatctgttgatgggtgaactaagccttgatggtagtctgcaacctatcaaaggagcactccccattgccattaaggccagagagctggggtttgagggtatgatagttccttgctcgaacgcacatgaggccgctgtagtgaacaacctaaaagtctacggcgtggagaatatcaaagatgtcattgagttcttcaacggaaaacaaaaattatccccgacacaagtcaatacccgcgaagagttttactcccaacaaagctcttttgaactggactttgcagaagtgaaagggcaggaaaatgtaaagcgagcgctggaagtagccgccgcaggcagccacaatattcttctcattggggccccgggtagcggaaagtctatgctggcaaaacgtcttccctccatacttcctcctttatcattgggagaaagcctggaaacgaccaagattcattctgttgccggaaaactcggtaaaggtggcggacttatctcaaaacggccattccgtgatccgcacaattccatttccacagtagccatgactggtggaggcagtttcccccaacccggtgaaatcagtctggctcataatggaatcctatacctcgacgaattgcctgagtataaccgcagcgttttggaggttctccgccaaccgctggaagatagaaaaattactgtatcacgcattcgatgcaatgtggaatatcctgccagttttatgctggtagcctccatgaacccatgcccatgcggatactacaaccacccgaccaaaggctgcgtttgcagtcccgggcaagtacagaagtatctaaatcgcatatccggacctttactcgaccgcatagacctgcaaatcgaagttaccccacttccttttgaaaagatggcagacactcgcccgggtgagtcgagcgcaacaatacgagagcgtgtgatacatgcccgacaaattcaggaaacaaggtatgcagacattcccggtgtatattgcaatgcccagatgaacagtaaactgcttgcctgctacgcccgtccggatgacaaaggacttgccatgctcaaaactgccatgaaccggctgaacctttcggcccgcgcctacgaccgcatattgaaagtatcacgcaccatcgccgacctggaagactgcgaatcaatacagccggcacacttggcggaagctatcggatataggaatctggatagggaggactgggcaggatgaaaaagggattagggattagcggtgagcgattaacagtcagcccctttaatctctaatccctaatctctaacccttatttctctatccgaatgcgcgcatccaccgctatcacctgcttttcagtcgccaacaatggattgatatccatctccttgatttccgttgcaaagcgcagcaaggtggaaagccgtacaataatttcggcaaatttatcttcattcacacccttctgcccgcgcgtacctttgataatcttataggcacgcaacgagtgaatcatggagtaagcctcctcataggacaacggtgcaagaccggaagatatatccttcagcacctccacaaaaataccgcccaggccgcagagtaccacatgtccgaacttctcttcatatttggcaccgataaacaattccgtccctttcagcatcggctgcaccataatagcactggcttcgggaatctgcatcatacggtcgaattccaatgccaaatgctgttcacttttgatattgagcacaacaccgcctacatccgacttatgcaccggccccaccacctttgccaccaccgggaatcccgtgcggcgtgcaaaggcaagcacttcttccttgttgtccgaaacaaactcctccacaataggaatacctgcagagctgagcaatgcctgcacatagtgcggtgcgatataaccgtccgcaggaatggaatctataatccggcggatacggggaacatccactccaaagagctcgatttcattattggcaggcctcggggcattcattatccgagaaagtgccgtgcccaaagtcacttcatcggcaaagttcacatggccttttgccagaaaagcagcaacctcggctcctgccgtattgatggaaggaagaatcggaaaaatcggcttcttgcaatgctgcatcttctcatgcagcacgtcatacatttcaaacatggtcaccagtcccggagtaccgaaaatagccattacagcatcaatattgtccaacttctcctcacaatactccagacagaggcgcagatgttccggcgtacccgtagccagaatatcaatgggattccccacagccgcaccggggaaaagcttgcccttaagttcctccgccaccggtccttccagtttcgggacattcagtccgcccttactcaacgcatcggtcaacatcactcccggaccgccggcatgggtaatgatggcgaagtttttccctttcagttccggcagtgtaaagatacaacctacggttgtcagctcctcgcgcgaatagcaacgcacaatacccgccttacggaacaaggcctctaccgccgaatcgctactggcaatggcccccgtatgcgaactcgccgcccggctgccgctttcgctactgcccgccttgatggccgcaatcttgcagcccttcttgatgagcgaggatgcatgaaacagcagacggtcgggatcaccgatactctcaatataaagaagttttattctggaatccgcttccggattgaagtgttcgtccatgtattgcaatacatcctccacaccgatttgcttggcattgcccacagaccatacagagttgaactgcaagcccttggtcacagcgctctccaatatgaacaccgctgtggcaccggagctggaaatcaagtctaccccttgcggatgcagttgcgggatgggctggctgaatacactgtgatgccacgagttcataaaaccgatacagttggggcctatcagagaggctccataccggttcaccgtttccagtatgcgatcttccagcacagcaccctcatgggtctcctcaccaaaaccggcagaaaggataatgaacgccttcacctgcttctccgcggcaagcacctccaccgcatcgggacaaagcgcggcaggtatggcaaggatggcaaggtccgtatcgggaatgtccttcacatccgcaaaggcagcaacaccctgcacttcagtctctttcggattcacggcacgaagctcaccggtatatccgccgctaagcagatttttcaggatagctcctccgggtttgtgtacattgttagatgctcccactaccacaatactggccgggtgaagcaattggcttgttatcatagttgtttttacattaagttagtgattcatgcacaaatatacattttccatacataaaagcaatcggtaaaagagaaaataagcttaatccctttgcaaaatataaataagtttacggaagtatatatatttgtgccatcaataacaatacgcagaaaactaccccatatggaaagccgtgtcaaagagatagattatctgaaatgcatcttcatcaccctgatgattatcttccaccttgtatatataggtgacaagtatccgtatgcgaaacaaatcgtctatacgttccacatgtccgctttcctgattatttcgggctatctggccaataaccggaaggatgcccgaagctttctccgcaagtttctatggattttcattccgtatgcctgcatggaggcggcctatacggtgatgtcgcatttcctgcccgtacgcgaaagtgtagatgccattactcctgctatattactcgacaagatattcctccatccgatggggccttactggtatctgcatacactgattctgtgcagcctcatctattatatcacattccgctatgtacggctgtcggttgtctcccggctggttgtggccggtgtctgcctgtttgccctttcccattggggaggattgatgaacttctccaatgccctctatttccttatcggcatgacagtgagccaaagcgggcttcgttttacacaagtctttcgcgccacaaccttcgccattgttccattcgtaatactatgctgctttcccgccaatctggataggggtactctggcaggagtcgccatcacctggctttccatcagcctgttgttggcagtctacaattatctgccggcacaagccaagcggctttccttctttataggacgcaatacgttggtcatactccttttctcgcccattttcaccattctgtccaaagcgtttctacccgtatttgccttcgaccctacggggatactgttccttgtcactgctaccgtcttcactcttagcggctgcatgagtatggcatgggctatggacaagatgcacgtttccaaattcttcttcgggaaaaggagtatattgtgctgagacgaaatcatcagatgataaacagtaattcaaggcaaacttttcagccaaatccccatagatagactggagcattctcttccagcaccccagccaatacccgctccgcctgccctacctcgatcaccgtttcatattgctagccagttcagcaatgtctgcatataccagacatagccttcgaaacgccgatacagccatataatcgaaattctccttcaaagtctgctcggacttatccagtacaaaattcaaagatacggtaggtatagctcatcagtactaaccatcggatggcaagaacggaaaaaaacagtttgtgcaacaccatttcactaagcgtatccaactgtccaagtactgtttttgccagcaagcaaacagaagcaggcaaattccgcgtggcaaatatgtccatataaaaaacaagcaacatcatctttcgcctgacgctgctgcatattatagaacacgtctttatgaaccccgtttttccaatacgctggaaagtaatcaaggcaatgtttctaccattctccaatgcagaaagcatcttttccgtttcctccgtttggtcgcaaaagtatcggagagaggcatagccataaatcagaaaaggatttctcagttctaagccgacttgtttcacacctaatgattccacgttttgcgttacacactttacataatgcaaaatatgtttatatgataactccagttaccccaacagtaactccatttacactataaggtaacgaccgttcatggaataaaagccgttacaccttacagtgaacggctttacattagaaggtaagcaatcgataaatacactgtataagactatggcagtatttcaccttccgctgtcacctttacgtagatttccctttccccttgctccatctctaccaaaaagtaactgccatcgggagtctcaataaagtcggcatcatcaatgacataaccaggatgggcagccataacagcgttcttcactacatcctccagatgcctcttgctgatgtcccaggtagtataggcccatgcaccctcagcggtgaacatcacatccttgctgatatttccatgcacgatttcgacttctgtcataccgctcttttctttttcaatatccacaatgcgggcattaggatatttctctgctataaaatccttgatggcggtggaaatatcagaagggagataatcttcgggagaaccgccgttgtgcgcatcggccacttctttcaccagaatgccgtcttccgaataatagaggtccatttcctgattacctttctccacttcgatgatgtagacaacagccatttccttacgttccagcttgtctacatcttccaccttccatacattataataggtactactctcgtaagagcttctcaccggagcgggaaggtccgcataacggaggtcggtttcggtcatctgccatacaccgtctttggtgaaccaagcctccttctcgaaattgtcctcatggaaatcggccacataatatgcaccttttgtttcccattctatacgctgagcattgggatgctccttggccaacgcattactcagttccgcgggcacggagattccgtcgttgtcgtcatcatcacagctttgcaaggcaaaggcaaacacgcctaacgccaataataagaagtacttttccagtttcatagtcatttcattttttacattatcaatatcaaatttgttcgtttcgtaggacaaagatgaggcctaaatctggaaagaatctggaagaatactcatattttgcagaaaacagctatctttgtgccactaaaagcgttcataacaaaagagatacataataacacaatggaaaagaaattcaaacgtaccaccgtgacctcggcattgccgtatgccaacggcccggttcatatcggacacctggcaggcgtttatgttcctgccgacatctacgtccgctacctgagactgaaaaaggaagatgtaatcttcatcggcggctccgacgaacacggagtgcccatcaccatccgcgccaagaaggaaggcatcaccccgcaagacgtggtggaccgctatcatacacttataaagaagtctttcgaagagttcggcgtctccttcgacgtgtacagccgtactacttcaaagacgcatcacgacacggcttccgacttcttccgcaagctgtacgataagggagaattcatcgaaaagaccagcatgcagtattacgacgaagaagccaagaccttccttgccgaccgctacatcaccggcgagtgcccccactgccatgccgaaggcgcttacggtgaccaatgcgagaagtgcggcaccagcctcagccccacggacctgattaatccgaagagtgccatcagtggcagccagcccgtaatgcgcgagacaaagcactggtatctgccgctggacaagcacgaggaatggcttcgccaatggattctggaagaccataaggagtggcgtcccaatgtttatggccaatgcaagagctggctcgacatgggcttgcagccgcgtgccgtgagccgcgacctggattggggtattcccgttcccgtagagggtgccgagggcaaagtgctctatgtatggttcgacgcccctatcggctacatcagcaacaccaaagaattgctgcccgacacatgggagaaatggtggaaagaccccgaaacgcgtctggtacacttcatcggaaaagacaatatcgtgttccactgcatcgtgttccccgccatgctgaaggcagagggtagctacatcctgccagacaacgtgccgagcaacgagttcctgaacctggagggcgacaagatttccacttcacgcaactgggcagtatggctgcacgagtatctcgttgacttccccggcaagcaggatgtgctgcgctacgtgctgacagccaacgcaccggagacaaaagacaacgacttcacctggaaggactttcaggcacgcaataacaacgaactggttgccgtttatggcaacttcgtgaaccgcgccctgcaactcaccaagaagtacttcgacagcgtagtacccgccgcaggcgaactgaacgactacgaccgcgagacgctgaaagaatttgccgacgtcaaggcagaagtggagaagttactggacgtattcaagttccgcgacgcacaaaaggaagcgatgaaccttgcccgcatcggaaacaaataccttgccgacaccgaaccgtggaaacttgccaagacagacatggagcgcgtagccaccattctccacatctcgttgcagttggtcgccaaccttgccattgctttcgaaccgttcctgcccttcagcagcgagaagcttcgcaagatgctgaacatggacagctttgactgggcagagctgggacacaccgacctgttgcctgccggacaccagctgggcacccccgaactgctgttcgaaaagatagaggacgacgtcatccaggcacaagtggacaagctgcttgccaccaagaaggcaaacgaagccgccacctacaaggcaaaccccatcaagccgaccatcgccttcgaagactttgaaaagctggatatccgcgtaggtacagtgcttgaatgcgaggcagtgcccaagatgaagaagctgctgaagttcaagattgccgacgggctggaaaaccgcaccatcgtcagcggcattgcccagcactacaaaccggaagaactggtaggcaagcaagtgctgttcatcgccaacctcgctccacgccaattcaagaacgggctggtaagtgaaggaatgattctctctgccgagaattatgacggctcgctggcggtgacttcactgctgaaagaggtgaaaccgggcagcgaggtgaaataaagcagtaacaaggtaacgagttaacaaggctacagggaggaaggaaaagcctcgtggccttgttaactcgttggcttatcaaccaataaactatgtccgatacatcactcaaagaaaaaacagccaaaggcctcttctggggaggattcagcaacggcatacagcagttgttaaatctgggattcggaatagtccttgcccgtctgctggatgcttcggattatggtatggtagggatgcttaccattttctccgccattgccgccgccttgcaggagggtgggttcatttcggcactgaccaaccggaaggagactttgcacaaggattacaacgccgtgttctggttcagcctgatgtgcagcactactatatatatattactcttctttgccgcaccgctgattgccgacttctacgatacgcccgagctgataccgctgtcccgtctctctttcctcggattcgtcatctcaagcatgagcatcgcaccgagagcgtatctgttcaagaatctcagaatcaaggacactaccatcatctccatttcgagtctgatagtctccggcattgtgggcatcacactggctgccaacggattcgcctattgggggattgcattgcaaagcatctctttcatcaccgtaatgacgattcttaacttctacttctcgcgttggagaccccacttccggttcgacttcacacccattaaggagatgatagggttcagcagtaagataatcattacgaatatcttcaccataatcaataacaatttgttttccgtcttgttgggtaagttctactcggaacgggaagtgggtaactttacgcaggcaaacaagtggaacggcatgggacataccacgattacgggcatgataaacggcattgcacaacccgtctttacccgtgttgccgatgacaaggcacggcaacttgccgtattcagaaagctgttgcgcttcaccgcctttatctctttccccgccatgctgggattgagtttggtttcgaaggaactgattgttatcactatcacggagaagtggctgcccagtgccgatatcttgcaactgttatgtatttggggagcatttattcccgtcatcaatctgttctccaacctgctcatcagccgggggcattcttctatctatatgtggagcaccatcagcttgagcctgctgcaaatagtagctgtatgtgccatatacccatacgggttggagtggatgctgcgtattttcgtcattatcaatatcggctggctatttgtatggttccgttttgtcaagagggagataggattaagactgcgcgatatgctgaaagacatctctccttatctctccctatccattgtactcgtagtatcaactcactatgccactcagcccatagaaaacctatacttaaatatggcagccaaaatcattatggtagctgggctttatgcactggttttgtggaaactacaatctaccatcttccgggaaagcattgaattcctcttaaagaaaaaaagagcatgagccgcatagcctacatcatatccgcctacaaggatgccccacacttggcacgcctggttgccgcactggatgaccgggcagacttctacgtgcacatcgacctcaatgccgatatacacccttttgaagaagccttgggagacaaggtcactttcgtgccccgccaccggataagctggggaggatgggaacaagtggaataccagaaagaattgcttgctgccgtattgcacagcggtatcccctatacccgcgtagtatgcctgagcgggcaggactacccattatggagcaacaacgccatccaccgctattttgaggagcatcaagacactgaattcatcggcggtttcaacctgacacactgcaccgtgaaacagcagttgcacaagataacccattaccaccctttccgtgacctgccttggaagagtatatggtggaagaacaaactcatcgtagcatcgcgcaagctggtacagatactccccatccggaaagccccttttgcacccttggaaggcaagcaggcagatgtctatttcggttccgactattgggccatcacgttgccctgcgcacgatatgtatatgaaaagttgtgcacggaggagaagctggtgaagtatttcagaaccagctttgtacccagcgaactgtgcatacagaccatcgtattcaactccccttttgcctcaaaagggcttcttttagagggagaataccccggacttacccgtctcacccccttgcactacatagactacggcgcatccatccgcgtgatgacactcgaggacctgccggtattgcagcagtctggaaagatgttctgccggaaagtggtaagcggggagtccgacacactgatagaaaaactcaagtccgatttcgcaaaagaagattgaaatggaaagtgctcctttcaactattatcattatttttgcagacatcaatcaaaaatggtatccatggtgaagcaatataccccagaagaactgacccaactacatcaggtgctatacgaaatactggaagagattgtgcgcatctgcgacaaacacaatattccctattttgtaatcggcggaacagcaataggggcactctatgacaaagcgattcttccttgggatgacgacatagatataggtatgaaacgggaagactacaataagtttctccagatagcctcccaagaactgagagaaccatactttctttcatggatacataccgaccctcatagtccttattactttgccaaagtcaagaaaaacaacaccttgtttgtcgaagagatgtttaaagatgtacctatgcatcagggaatctttgtcgatatattcccttttgaccgtattccaaacaataagctattaaggaagatacaatatgaagccgtcaactttctgaaatgctgcctgatgggaaaagaggtatggctatggaaacacttcggaaaatgtcaaatatccaaccctatcaatcgtggagctgttgcctgccttctgaaccggatagttgatatgacactctctaaaaagacaatctaccgtttgatggtgataatgcaaagttgtttcaactcatggaaaactttgtattacaacaatgtgattaccactaccgaccatgttttggagacgagtctcaaccatttacaaccaatcaaattcggtccactttatctgaaagcacctgatggattggaaaactttctacggtacaactatcccactttacaccggtatacagaagaagagcaggacaagataaacaatcattatccggcagttctttctttcaacataccaaatgaccatatagccacctcctaatccaacaaaattgccatgaaaccagcccttgtagatgtatctgtactgattcttttcttcaaccgccccaaactgctggcgcaagtattcgaacaagtgaagaaagcacgccccgcacgactgtttctctatcaggacggcccgcgcggcgagcgtgacatgccgggcatagaagcttgtcgcaaagtagtggcagacatcgactgggaatgcgaagtacaccacaactaccaagagaagaactacggctgcgacccatcggaatacatggcacagaagtgggcattctccttgtcggacaaatgtatcgtgcttgaggatgacgacgtgcccgccgtctctttcttcggcttctgcaaggaactgctcgacaagtatgagcacgacacacgcatcagcatgattgccggattcaacaacgaggagattacacccgacatcacttccgactacttcttcgccaccaccttctccatctggggatgggcgagctggcggcgggtgacggaccaatgggatgaattctacaccttcctggacgacaaggagaacatgcggcaactgaagaacctcatccacacacggcgctaccgcaaagacttcatctacatgtgccaacgccaccgcgaacacgggaaagcctattacgaaaccatcttccacgcttccatgttgttcaattcgggtctgagcatcgtgcccacccgcaacatgataaacaatctgggagccactgccgactccacccactttgccggctccgtgcacaccatgccgcgcggttaccgccgcatcttcaccatgaaacgccacgaagtggagtttccactgaagcaccctcgtcacgtcatcgagaacacagcctacaaggatagcgtttaccgcatcatggcatggcggcatccctggataaagattgcacggtcgttcgaggaactggcgttgaacctacggtacggcaacttcaccatcatatggcaaacgctgcaaaagcgtatccggaaatggatgaaacaagaccggcatctgtaacaagaaaaaacattcaaaaaagaagaaacgaacaacagtcatgagagtactacttatcaatacatccgaacgcatcggcggcgcagccatcgccgccagccgtctgatggaatcactcaagaaccacggcatcaaagccaagctgctggtacgcgacaagcagaccgaccaaatctccgttgtgtcactggaccataactggcgcatggtgtggaagttcgtctgggagcgcatcgtcatctggagcgccaaccgcttcaacaagaagaacatctttgccgtagacattgccaacacggggacagacatcacctcactgcccgaattccagcaagcagacgtcatccatctgcactggataaaccaagggatgctctcgctgaagaacatcgagaagattctcgcctcgggcaagcccgtcgtctggaccatgcacgacatgtggccctgcactggcatctgtcaccatgcccgcgagtgcacccactaccagcaggaatgccacaactgccccttcatccacggaggtggaggcaaacgtgacctttcctaccgcatcttccacaaaaagcaggcattgtatcgcaaccgtcacatcaacttcgtcacctgcagccgctggctggaagaacgtgcccggacaagcgccctcttctgcgggcatgccgtgacatgcatccccaaccccatcaacaccaatctcttcaagccccgaaaccggcaggaagcccgcagccgttgcctactgccgcaagacaagaaactcatgctgttcggctcggtgaagattacggacaaacggaaaggcatcgactacctgatagaatcgtgccgactgctggctgacaagcatcccgaactccgggaacagttgggtgtcgtcgtcttcggcaaccaatcgcaacaactggaaaacctgcttccattcaaagtctacccgctgaacttcgtcagcaacgaacaccaactggtgaacatctacaatgccgtggacatcttcgtgaccccctcgctggaagagaacctgccgaacaccatcatggaagccatggcatgcggcattccctgcgtcggattcaacgtgggcggcatccctgagatgatagaccatctgcacaacggctacgtggcacaatacaaatcctcggaagactttgccaacggcatctactggacgctgaccgaacccgactaccccagcctctcggaacaagcctgccggaaagccatctcccactattcggagaacgtcgtcgccaagaaatacattgacctttacaacaaagtgaccggaagaaatgcataaccaccccaccccgaaattcagcatcatcaccgtgacctacaacgccgaagcggtactggaggacacgattcaaagcgttatctcgcaaacctaccaccacgtggaatacatcattgtggacggtgcgtccaaagacggcacgctctccatcatcgaccgttaccgcgaccgcatcacccgcatcgtgagcgaaccggacaagggactgtacgacgccatgaacaaaggcatccgccttgccaccggcgattacctctgcttcctcaatgccggcgacagcttccacgaggacgacaccttgcagcagatggtgcgttccatctccggcaacgaactacccgacgtgctgtacggcgaaacggagctggtggacaaggaaggccacttcatccgcatgcgccgcctcgccgccccggaagtgcttacctggcgaagcttcaagcagggcatgctggtctgccatcaggccttctttgccaaagcttcccttgtagaaccctacgacctgcaataccgcttctccgccgacttcgactggtgcatccaggtgatgaagaaggcacggaccttgcacaatacccatctcaccctcatcgactatctggaagagggaatgaccacccagaaccggcaagcatccctgcgcgaacgcttccgcatcatggcgcggcattacggactggcgagtaccatagcccatcatgcctggttcgtattacgggccgtgataaagaaatagcacaagtttcgagggcaaatatactttgttcccgcaagacctataccttgtgggaatccccccctatacccagctccctacagtataggagtgagtacccaaaacatccccatgttttcacctaaaacatccggatgtaatggggcaaaacatccccatgtttttgggtaaaacatccgggtgttttggagaaagacatccggatgttctgcatattaagtcctataccgtgaggggttaagtcctaagacgtaggagattaagtcctaaggcaaaggaggctgggtagctgcaagcagcgccttcaactcttttaccccttccgaagctcccttttgaatgacatgtatcggacgcatgacgtgcgtgtccaccggcttggggtctatcagatacacttcggcggcacggggcacgtagttcagcagtcccgcagcgggataaacgttcaggctggtgccgatgatgacgaagatgtccgcctgctccacataccggatggcagtttcaatctccggcaccgactcgccaaaccacacgatgaacgggcggagctgcgtaccgtcgcccgccttgtcgcccaactttacttcatattcctccggcgccagttccttgacgaaatgcggattataagggtcgcggctggaacaaaccttcgtcagttccccatgcaagtgtatcacgtgcgtactgccggcacgctcgtgcagattatctacgttctgggtgacgaccgttacattgagatccctctccaggtcggcaacgcccagatgcccggcattcggcaccacatcgagcaactgcttgcgacgttcgttatagaaattaatgaccagttccggattacgtgcatacccctcgggagtcgccacctgctccaccggatatttgtcccacagtccgcccgcatcacggaatgtgctgatgccgctctcggcgctcataccggcacccgacaatatgaccaagttcttcattttctgctcctttcctttattaaagtaagacaaatataagaagaatgttcaagttgtgatataaataagaaaaattaaatacttaaaagtcttatcattcaaataaaagacgtacttttgtcattcgtaaatttgcaatagactggaaaagaaaccaatccggtcgtcaacaaaagaatcttatggataaattcagttatgctatcggccttggaataggtcagaatcttttaagcatgggtgccaaaggcattgcagtagatgactttgcacaagcaatcaaagacgttttggagggcaaccagacggcaatcagccacacagaagcccgtgacatcgtcaacaagtacttcgccgaactggaggagaagatgaacgcagcaaacatagaagccggcaaaaagttcctggaagagaacaaaaaacgcgagggagttgttacgcttcccagcggacttcaatacgaagttatcacagaaggaaacgtcggtcactatgccaaagcaaccgaccaggtacaatgccactacgaaggcacactgattgacggaacgctgttcgacagctccatcaagcgcggccagcctgccacgttcggtgtaaaccaagtgatacccggttgggtggaagcccttcagcttatgcccgaaggtgccaagtggaaactctacatccccagtgatctggcatacggagcgcagggtgccggcgagatgattcccccccacagcacgctcatattcgaagttgaattacagaaaattttatctaaataaacaacaagtaaaagcaaaatgaaaaaagtaacatttctcatggctcttgcagtagctgccggcatggcatcttgtactgctcaaagtccgaaagctgatttaaagacggacatcgattcattgtcttacgccatcggtatggcacgtacagaaggtttggaccagtatcttgcacaacaaggcattgactcaacccagatgtcagaattcctaaaaggtttcaacgagggtgcagccaaaatcgataagaaagacgtggcctacatgaccggcctgcaagtaggccagatggtcagcaagcaatgggtagaaggtttcaaccagcaaatcttcggtaatgactctacacaaagcatcagccgcgaaaatatgctggcaggtttcgtcgcaggtgtcattggtaagggtggtgccatggatatgatgaaagctcaagagtacatgcgcactcagatggatgccatcaaagaaaaagcgactgcagagaagtatgctgacaacaaagctgccggtgaaaagttcctggctgagaacaagactaaagaaggtgtagtaactactccgagcggtctacaatacaaaatcatcaccaagggtaacggtgccgttcccgctgacagcagcaaggtgaaagtaaactacaaaggtacactgattgacggaacagagttcgacagctcttacaagcgcaaagaacctgctaccttccgtgccaaccaagtaatcaaaggctggactgaggccctcactatgatgcccgttggctccaaatgggaactctatatcccctacgacctggcatacggttcaagagaaaccggtagccaaatcaagccgttctctactttgatattcgaagtggaactgctgggtatcgagaagtaatgtaacaatccgaagggaggggcaaaaccctcttgatacttcttttaggcgcggattacgcggatttcacggatttagtttaccaaatccgcatattccgcgtaatccgcgtcttatcgttacccctcacttttattcatttttctgtccattttcatagataaattaaaataaagtcctatatttgcttactatttgataacaacaagaactttacttatttactattatggaaaaaatagacaatcttgaccggcagattctggaaatcatttcccaaaatgcccgtatccctttcaaggacgtagccgctgaatgtggcgtgtcacgtgccgccatccatcaacgtgtacagcgcttgattgaccttggcgttattgtgggctcaggctatcatgtaaatcccaagtctcttggatatagaacctgcacttacgtaggaatcaagctggaaaagggctccatgtataagacggtagttgccgagctgggcaagattcccgaaattgttgaatgccacttcaccactggtccgtacaccatgctgaccaaggtatatgcccgcgacaacgagcatctgatggatttgctgaacaacaagatgcaggagattcctggcgtaaccgctaccgagaccttgatttccctggaacagagcatcaagaaggagattcctatttgccccgagaaataacgaacaacaatggatttcttgaacgaatatcatctgtcgggccttgtcataggtatctgcacattcctcatcatcggcttgtttcaccccatagttgtgaaagccgaatattattggggcaccaagtgctggtggattttccttttactcggcatcggcggcatcattgcctccctttatacggagaacatcatgatagcctcccttttgggcgtctttgcattttcctcgttctggaccatcaaggagatattcgagcaggaagaacgagtgaaaaaaggctggtttcccaagaatccaaaacgaacttataagttctaaggacaaaggttataaggaattttatccaaaagtcttgcatatttcaatagaaaatgctacttttgcccccgctatccaagcaaggatgcatcggacttgtagctcagttggttagagcaacagactcataatctggaggtcccaggttcaagccctggctggtccacgttagaaatcaagcacttacaatgattttgtaagtgctttttcttttattggtgaccctcaggtgacctttttgaagcaaaagtgacctcgcgcgaccttctgaaacgtagagtgattatttgtgagttcatgaaatgtttttgcaaagatgacagtgaaaacaaacaagtcaatcgtaccaacattttcgttaagtcggaaggacagaaaacttgttttatgtcttggcgagaaaaggtctgttgaaaacgaatgcttatgtgtggcaagataaaggattattgctgtaccatcctccatataaataatgtggtatcatttggtcgtattagctcgcaaaaacacataaaaagggaagctactatatacaaatatctgcgcaatcaaagaaacaatgaaaatttttcattatatttgcaatattaaatcacaaagatgaaagatatcaataggataaaagtagtacttgcagagaagaagcgcactaacaagtggcttgcagaacagatgggtgtcaatccgaccactgtgtcgaagtggtgtaccaactcttcacaaccagatctcggcaatctattaagaattgctgatctattggaggttgatataaaagagctgttcattagagaatataaacaatatttacttttgcaggaatcaggtaagaagtaatcatatatgagatatgggatagacattttttctggagcaggagggctgagccttggagcggagatggctggaataagaataggtactgccatagagattaatccgtacgccgcaaaaacgttccagcgtaaccataaaaaagcaaaggttctacagggagatattcaaaaaatagacccgaaggcattacatgaaaaaggaaagtctatctttgtaataatggggggacctccatgtcaaggattctcaatgtcaaatacaagaacaaggaatatgaagaacgaaaagaactttttgttcttggagttcgtacgctttgtgcaagagataaggcctgactggtttgttctggagaatgtatggggaataaccaatatcaacgagggtaagacccaatcaatgattgaggattgtttccgatccattgagggttatgacaatatcacttcttccgtcctttgggcttcagactatggcgttcctcaaaataggaatcgattctttatggttggtaataggctaggcattgactttaaattcccagagaggcataccataaaagttactgtagatgaagccataagcgaccttccctccttacaaaatggagagatgcttgaggaagcaacatatactctgtcgctagaagaggcaagcgaatatgaacggttgatgcgtaaaggttcagacaaagcacgtcaaaactatgtgtcgagaaataatgatttagttatagagcgctacaagtacattggacaaggccagaactggcgagctattccagatagccttatgcagaattatgcagacaaaggtcgatgccatagtggaatctacaagcgtctgaaggccgaccagccttcggtcgtaatctcgaattacagaaagagtatgctcatacatccttacgaagataggggcatctcagtgagagaggccgcaagacttcagagttttccagataccttcatctttgagggtccgcttatgcacatccagcaacagataggtaatgccgtacctcccctgttggctaaagctgttttccaacaaattatcaaacaaacaaaagaacatgagcaaagatagaagacatattcccaaagcctctaccctgatgggggctctgcgttctatgggatactcttttgagtctgcggtagcagatgtcgttgacaacagcatcagtgcacacgcacagaatgtccgtatactgttcccgtctaatcctatggatgaattagctcttggcattcttgatgatggagacggaatgactgctgatgtcctgtttgaagccatgcgttatggatgtttgtcggcagaggaagaacgcgcagaagaagacttgggccgctttggaatgggaatgaagtcagcatcgctatcacaatgtcgttgccttaccgtagtaagctacgaaggcaagactttaaatggatttacctgggattacaatcacattcttgaaactcaggactggatgataaaagaattggaggcaaaagaaatcgatgcactaccctatattacgaaattaaaagaacaaaacaaaggtactatcgttatttggcaggactttgatgtattgtctaattctagtggaggacaagtctattctacactaatcgatttgcgttcctcattggaaagtactcttgctttaatttaccatcgttatctctccggcattggaacacaacgccttcatatctttatcaatgagctcgacataaatcccttagacccattccttgaacagcatccgaagactactatcaagaaagaaatcgagctagatataatggacagttctggaattgaaagaatgataaaaatacgcccttttattttgccatttgcaacagagttaaaagagaaagacaaacagcttatcggtggtattgagaatcttcgagctaaacaaggattctatatctatcgcaacaagaggttgattatctggggtacatggtttggcatgaagcaacgtgcagaattgacaaagaacgcccgtattcgtgttgacatacccaattcgctcgatgatatttggtccatcgacattaaaaagcaacaggcttctatccccaagcaaatacttcatagattgaaaaaggcagtggaggagacgcttgaattttccgtccgtcaacagacataccgaggaagaacggagaaggtagacgaaaatcttgattacatctgggacaggaaaagaagtagaaacaacacattcttctaccagataaatcgtgaaagcaagctttaccagtttgttcgcgacaaaatgagtgacgaagattatggatatatggaaatgcttcttaacgagatagagaacaatttacctatccagcagttgtatatagacaagagtaacgagtccatctcggcaccagaagagactaatgaacggctcgacgatgtctatcagatgggggtgacattagccacaaccatgatgaatatccgcaccgatggatgggaagctattgtcaatgacctaatgaattccgaaccttggtgtaaatatcctgctataaaagagaaacttctcaaagaaaaaatataatatcatgacagaaaacgaatatactatcctaaaacagtttacgagaactttcatagatttatccatatcacgagggaaagaactcaaacctgaagatatagattcctatatcaatcaggctatcatgctctccaaactggactgcgccgaagccgcaaagacacgcatttttaccgatatggagtatgagtataagatagtacacaacaaagggcaagctatattcaacgattatgacaaaaaacgtgaatggtactctaattttaagatacaggacaatttcttttggtcgagatacaaggattatctcatcaaccattcttctataagtcgtatcagcatcaatctgcttgatgatgtaacattaccagatattatgaattgtcttggcaatcccaatgatgttctagacaaaccgcgactccgtcggggactcattatcggtgacgtacaatctggcaagacagcaacctatacggggttgatatgcaaggctgctgatgcaggatacaaggtcgttatcctgcttaccggcatcacagaaaatctgcgcaggcagacacaggaacgaattgacgagggcattgttggcatcaccctgaaaaaagaaggtaagatcgagaagtacccacgagtcggtgtgggcttagacaacaagcaaatcaaggccacctctgtaacgtcaacgcttaacgattttgttggcaattgtaacaagataacaatgtcgttggcaagcaattctctggtgttgtttgtcataaagaagaacgtttcggtacttcagcgacttttcaattggctgagagaacaaaatatcgatccaataaaaggatatgtggatgtgccaatgcttcttattgatgatgaagcagataacgcatctgtgaatactcgcaaggatgagaccgacccaactcgtacaaacaagctcattcggcaaatctgcaatctcttcatgaattccacatatgtaggattcacagctaccccatttgcaaatgtgttcatagatccagattctgtggatgccatgcaacatgcagacctcttcccagagcatttcatttatgcattagaggcaccgtcaaactatgttggggctgataagatattttacccagaagggaccttctatcataatctgcgttatatcacagacatcacagaaccggactatgcatcagaggagtataaagacctcgctcaaaacagcccagaagttcttaattctggattattttactataaacacaagaaagaatggaatggcattttaccaggctccctgcgtgaagccattctgtgtttctgtttggcaaatgttgtccgcgatttacgcggacaaagcaaagaacccagaagtatgcttgtaaatatgtcccgttttattcacgttcaaaaagtgataactgaacatgttgccatatggtttgaagaaatattcaacgacattcgtgttaatttcaacaacgatgcaagcaaaaatcatcacttacctttatacacagaattgtgttctatttgggagaaacattttagcaatgtcactgatgtaacatttgaacgcgtctcaaagaaggtgtccttattggccgcattggaaaagatagaggtcaaaatggtcaatggttcaaaacagagtgcgtcactcaattacaaagagaatccttcgctgcgagtgattgctattggtggccttgccttatcacgtggtttgacactagaaggcttgatggtcagctacttctaccggaatacagcgacctttgatgtcctaatgcagatgggtcgatggtttggatatagacggggatatgaagatcttttccaaatctggacgagccacacaagtgccttgtggtatgccgaagtcgcaaaagcttcagcagaactgaagaacgacattcgtgagatgtttgaccagcaactgactcccaaggattttggtattaaagttcgtgacaattgtgatgagttacaaatcacagcttcaaacaaaatgaggacagctgtcagcaaagacatgatgtattctttttatggtaatatctatgatacaccatacataacatcaaaaatagagcataacaagataaacacgcaaagggttcaggaacttgtttcctatctttttgcacaaggatattcgctcaggtttacagattacaagaaagttaataaggatgtcagcgactcttctgatggcagttcgcgatactttgccgacgttcctaaagaagttgtggttgagtttttgcgtggcatcaaatattcaatggcaaatcctcgttttgatgcaaaaaacatcatcaattttttggaagatgaggatacggaaggagttgatttgtgggatgttgtatttgaaagtggtaaatctacgacacattatgatgtggaagggcttcgacaagtaaaatgtatggagcgttctatctgtagtaccactcgcaacatcatacaaattagtacacgtcgtcgtgtaatgacaggaagtatggaaggacgttttgccttatcaaaagaagatatagcaagtgcagaagatgctcagcgtaaccagtgggagaaagatggtgagaacagccagggaagagacatcccagtgaaggcatatttccgattccttcccaagcgaaagcccatgttggttattatgttcatcaagcccaaagaggctgatggcgaggaagaagagatgctacataaatacagagaagaacttggtgatgattgtatcgtggcttttgccgtgggatgtcccggcgttaaagatgagggcaaggctgtaaaatatcaagtaaacaagatattccaacaattgaacatagagggagaagaacctgaagaggaggatgacgatgagtaataacgagatttataaaacatttagggaggattttccctgccgccactttataagatttggtgataatcgttaccttagtctctatattgggcgtgatgacgatgcacgctattcctttgatttcagagggaaatacaaacctgtcagaattttcagttctgatgtaatttttgttgagcagtataaagacggagatatgctgactctgcgattctctcttgaagacaataacctattagagtatttttgtactttctgccaagaccttttggattctgttcgcatgacgaatgatgatgaaacggcatatcatattctacggtcacgttactattcatggagacaactgttccgaccagacaatacccgtatgacggaaaccgaaataatgggcttgataggcggagggcactgaaaaaggctctctaaaggcaataaaatgaaaggttcgccaagtccatataattggatttggcgaacttatttttctacttttgaatctaagaatttagcggttacttgccctgtaaagcttaaaaacggccaattaagggctttttagagaacgaaaaggctctcccctcatctgagtttgaggattctcttgatatttgctacaaagataaccatagccccttgcatacgcatacattctattccgtatgaccatgctcggtcataccctaatacattttttaattcggagttcttggcctctatcttatatctcacttttgctttactcctgaactcttccgatttctcaaacgcctcatgctgctgatgctctgatgattttatttgaacagaatatgttttagattttgcgccttctttgtagcatccctctcgccttgaacataacttgcatttatctacatcaaagaaatagaccattgactgattcgttccctgtcctttctttccttgtacagcgcgcctaattgccatatggccagccgggcaaacaaacatgccagcgtctttattgaaatcaaatttatcctcatccttacggaatccattgcttatggctggatttaatcttgcaactagctcaaaaccattctcttcattgttcgataatatgatgttgtctttacctgaataagctgtgtctccaacgactgtttccaccgtcattccgttggcacggctctggtttaccagctcttcaagttgtgggccatcacccttctctcccgaagtcactgtggcggcagtgattatacgctcatcgctcatggcaatatgtgtcttgtagccgaaaaacgagtcatcctcgctcttgtgacccacccgtgcatcttcatcttttgatgtcatataatggtcttcaatatcggcaagtacctccttgagcatattcagccgctctttgaccttgggtatctctgccaatgagggatttgagctaactacatcaagcaatgcctttgtatagtcaagctcatgctcaatgttgtcatccgtgttcttcgaaggcagattgctcttttcggtctcgtcggcatcatatatgcttttgcgcaattgcttcgagcgcaatcttagactctccaagggtgaccaaggattgctgcgtgagccggtatgggtggcatcaactataatcgtgcgagactttattatgcccttttctatagctatgccaacagtcttgccaatcagcaaatccagtagatctttatcttttagacgcaacttgcgaaacttgcataatgagctcggattaatcaaatctgtttcctccggactcatcccaagaaagtatttgaaagacatatcatatcttgatcgttccacaacatcgacatcggatatgtcatagattgttttcaacagaagatatttgaacatccggatgggacattcggccatccttccattgtcttgacaatacttgtcaacgagttcttttttaataaaagaaaagtctatcaaatcatttatctgacgcaataggttgttacgaggaataatcaaatcgtatagatccgaataattactgaactgtatagtctgttgtagtggtagcatatctgtctgattactaccataaagttacaaaaaaatcggcacatactcaagcttttgcctgaatatgtgccgatttttttaggacgctactatatgggggactttttcagtgccctctgataggcgagctcctatttttgaaagactacatgatacctaatagaggaattgatgtagctcttgatagttggatggggccagagaaaacgcacaaagatttttccgaccagcaagactggtttgaagtgaaaaccattagttttggcaaagagagtgtccgtatttcttccattgagcaacttgacagtgacattgatggaacattggttgtttatgaactcgagaaaatgagcccatcctttgacggtattaggataaaccaactagtcaacagtattatagctttgttagtgaatgttcatcaacgagagacctttatagcaaagttgcaattgtttggatttgatttctccaacgaaaatgataatctagtatttgcgttgaagaatatgtacaaatacaaggtcgacacccaagatttccctcgattgcatcggtctttgctaccgaatgcaattgcacgtgctcaatatgagttgcttttgacagaaatagaaccatttaaactcaactgatatggaaattgaagaatatcgcaaacagtttattgatgagataagaaatgacgctagcttggaaggctctgatccagaaagctacttcatcgagcgtgtccttacagatcttgaagatattggggaacttagcgatcctattcctatgtcgattgaaatcaggaatgcaagaaggcaaattctagcctttgatgggtattcatatgatgaagcagacggagctttggttcttattgtaagtgaatttaccaatcagcgtgatagtgctccaactctgacaaatacacgaattgaggaattgctatcgtatatgcaaagattcatagaagaagctgtcaatggaaatattcgcaatttctgtgatgattctgacccagctgtaaacatagccagggagtttaagaagaagataggcaagggtatgacggcaacagaaatcttgcgtttcaagtttatcatcatatcaaactgtactctgagtaaacaggttaagaacctaaaacgtccaaactttttgggaagacctgtagaattgaatgtttggacattagagcgattcttccagacatttgtttctaactccagtgaaattctagagattgagacaaaagattataactgtgatggcattccatgtttgaaagctaatttgggtaatttgagtaattatgatgcatatctgggaattgttcctggagaattccttgcaaaaatatactatgattacgggagtagattacttcaaggaaatgttcgcgcgttcttgagttttagaggtaatgtaaataagggcatacgaaataccattatgaagcaaccagagaacttctttacatataacaatggtgttgctattgtagcccgttctgtaagattctctgcagatgcttctaaaataacttatttcaaagatttgcaaataataaatggtggacaaaccacggctgcattagcgagtgccatcatcaaaaatgaggctccgaaaggcatggataatctgttcgtaccaatgaagttaactgtgttgaatgttgaagatgatatgttggaagaacaggtacaaaactacaatgagctgacaaagactatttcagaatgtgctaacagccagaatgcggttaagcctgccgacttcttctcaaatcacccattccacgtaaagatggagcagttatcacgcaaagttatggctccaccagttggtggcaatccttatcaaaccgtatggttctatgagcgttctcgaggtaggtgggaacaggaacaaatgaagttgactccacatcaaagagacctgtttaagcagaaaaatcccaaagaccaactgataacaaaagagaaactggcaaaatgctataatgcgattcttatgcaccctgaccaagtgtgcaagagttctgctgataatttcaaaatatttgcaccttttatcgatggtatatatgagaacgaccgtgacagcatcaatgacgaatttttcaagaaatgtgtctgttcgattatcatatttgacaagctagacaaactcatcagcaaggaagattggtatccaaaaggcggtaacaaagctcagattacgccatatacaatatccaaactgatgacgcttctacccaaaggagctgaccttgactgggtaagcatttggaataagcaaactctttatccagctttagcaacagaacttcttcgcctggcatactttacacattgctatttagagaaaaaagcaaatggaggacttgtacgtagcttgtctcgtcttgtcggaacatggaacgacttccgggcagtggagttttctttgtcggatgctttcattagctcgttaatttcgaaagaagaaacaaaggcaactgaaaaagttgctaaacgtgctcacaagtttaactccaaaattgacgcttctgtcaagattttcgaacttggcgcaccatattggatgggagtctataatgctctagcaaaagaagagctcctctcctatggtgattgtgattttattaggagcatagcatcttatatcggcagaggctctctgccaagtcctgctcaatgccgtaggctcctgaaaatagtagaaaaggcagaagaaaagggatatattatgccgtaaaaagattataaataaaaacattaaagtttatacagaataagaaacaggggtattggttgtcagtgccctaaaatcttattcgatataatatctattacattgaaatttccttgcctcgttttctatgaatttttccatcatacagtccctccgccacatcgccaacctctttgagtgtatggcgatgttttatttcgtcaaaaggctgtctgctttccgcataatcacaaatccatgcgccaatggttttctgctgctcggtagtttcgccatattcctgcatcacgctcttgatgtctgcggcttcggacggggcgaagaatgacttgtgctgctccgtgccgaaatggataatcgcatctatggctcgcctgaatacctcgcttgccttgtagagcatatccgcaaacaggcttaggatatgcctgctcgctttcagcgtattttgcaacaggcggatggtcttgtctttctcagccgtggcttggctcaccgcttggctgatgcgctgccgctcgccgtccttttgctcctgaagctgccgtaccgccttgtccctttcaatggcaagtgaacggctctgtaccaaagccctgtcacgctccgattcggctttctgtttttctgcgaccaatgcttttgtccgttcctccgccttgtcctttacggcttcggcaaaggctttcttcatgcgctcgttctcggctttcaatttggcattttctttttcgaccgaagcgaacttgccgaccccgacaagacagccgacgctgtccagtatgctgtccactttcgactttcgctcgtctttgagttgctgctccctttcggcaatctcgctgtcgagggaaagacggtactgctctttcgccttgttctctccctccacgaacatgagttccgcttcggcttcctccttggcggagatggcggcttgccttgcggctttagcctgttccgcttcctgcttctgcttggcgatgatgaagtccgtgcgctccagatgttccttgcccgtcacctcctttgagatgcccctttccatatcaagacacccagccaaaaccgtctgcatctcactcatggctttctcgtccagtttgcaggacttgcccgtatcgtggttcatccagtcccacacgatatgagcgtgcaggttgggcttccatgtggcattgtcgccgggtattccgtagtgtccctcgtcacggtggatgaacacttgcagggctgtgacaccccaacgttcgttacacacctcgcagaagtgccgcagttgctccatcgtggtatcgtccttaatgacaaccacaccctccttgagcggagtgctgccacggacgatggtcaccttaccagtcttcttgttcacccgttcacggtctttggtctgcatcgcccgtcctgtcttttccttgaccatagcggctatccggttgtagcggtcggtgagcgtggcttcgccgaaatcaggtgatacccatgtctcgtttcctgccatgaggtcggtacggatgtagaacttctccttgcggatattggcgagatattccgctgtccgtctgttatgcgcttcactgctgccgatgttgcacggcttaatgttgatggatgtcttctgtgccataggcttgtctgtattttgggtttcacttcgggttattagggcagagccttaatcggagggtgcagggagagggtcacttcctgctccgggttcttaggggtggaagccactaagcggagtttccaaagagggggtcactctttggtcgggttgcacaggactgaaagtccttgccgggttcttagggcagcgtcctaagcccctcgggagagcccacaacttcggagtgcagcggagaagttatagtgggctatatctgggcaagcccagtcagtcacgcccaccaatggagtaccgctgaaatcctgcgctgtgcgcccgtcagtccctcctgcctatgtcggtgtcatccacgctgccaatcgtgccgtcctgcgcttctttcgggttttatacgggattgttttcatgctgcccgttgtcattgtctgcgatatggggattgtcggttttgtcctccgtatccgctctgtcctccgaactgtcggaaaccacaggcgagcaaagggaagaagaaagggcggctgctccgtctgacatgctgtccacatcctgccttgggcataggcaaccgtccggcacgatacacggcttatcctccaacggcatatcattggagtatggtgtccacgctccgcctgtctgtcttttggaaactgccgcaggcttgacataatgggggttgctcagcaggacaccatccacataccatcctgtcaggaaatgcagggtgtgtatggaagtgcggttgttggttcgggtggtcagcataccaagtctgttgaagttgtcgatgagctttccgatggtcttgcggttgcagcccatgtattccgccagttccacatcggaagctgccgcctgtcccacctccaaggcaatctcaactcccttgatacggaggacggtctttgtccgcacggctgcggtcatcagcctgtgcaggcacttctgtctgttgatggcggctttgccgtccaaaaggaaatcccactgcccggcggaaaggatggtgcagtaatgtatggtctgttcgttcttgcacatagtctatgatgtttataggtgttacactggtcagctacctgcccatgccgtacccgtgttccggcatatggtattccttgtccgcagcgatgcggttcagcacatcctgcaaacggtcgagctggtcatggtcaagcacacggattgcgttaatggttatcacctgcgtggcaatcctgcggtgtgcaatattgttctcgctcatcgtgccgtcaccgtcagcatggactgaacggaggtaggcattgaccgcttccgtctgttcctttgaggggtacggtgctacccacctgtcttgaatgtagccgaccattttgccgaccgcatccgccaagagcggattgcgttgtgcgataattggtatcaaatcttctttcttcatgtgactgttattttagaagtcttgtgattgtttatttctcgttgattttgttgactttgttgagagagtaccgacaaaagggaaaataaaaatcgcatccaacggtttaggattctacttttcttttttggccagcaattctgttgaaaactgttgagactattgttgaatcatataagccttgctcatacgtttctccctatatttcatcaaattcaacaaactcaacgatagtctttcagaatttctcgggtgacggtgtaaaagcgaccgactttcttgggtgatgctgaatacttctgtcccggcaacacggatatttggtaagtggaataagacagcgcattgggagcaggctccagtttccaacactgttgcaggacattcctcacttggtggcgttccactcttaccatagaatagttgaacaacgccaataggtcgttgatgcagaaatccaccacattcacctgcatgcagtccatgatgtcgagcagcagttcagccatgtcaagttctatgcggctccgattgctgcggatgattttctccaatgcttccgtgcgtatgagtgacggcgaaaaccacattcgactttcttctttggttgtcaagtcacgatgcaacagatagtgcaaaaatgctgggatttcgtttttcaatttctgtagaaacgaagtatcatccttctccaatcgactaactttcctcacccaataacgtgtttcctccggctcaatgtaaacggggaaattctcgttgttggaacatagcacgaacttggcgaagaactgcacttcataacggtctttgcctttggcttccatcttgtaggaatgtgccgtacttaggttcttcaaccgttcactatcctcccggcggttgagcaacacttcgtccaccacaatcatcagtttgcctgcccaatcggcattgaactgactgcggaaatcctcattcgtattgaaagtaacattatcctgaaacaatgctttcaagaagttcaggaatgtactctttcctgtattgcgttcttcagataccaacagaagtatcggcaatttttgtgttggtttcagatataacagttgaaggtaatccattcccaactcatgctgctcaccaaaaatgtgttccaccaacgagcggatatgcttgaaatcgccctccgtaggaatatgggttatcggctcgtaaaggttatagaaacctgcaacctctttttgatagttaatatgactcggtactgtacaaaagccattatactttgtgatgggaggaatattgttctttccataatcctgccggatagtgccaaagctccattgaatccgacgggtgatagttgtaccatcgaccaaaggctgctgcactaccttatatattgtagtacctactcgaatatataattcttccatattgctcctcttgggattatacattcaattcactacatccagaaccctgtactttcgatttcacaagtgaagtaatctctctctttgagtaaagattacgtccacctaacttgtgaacgataattgtaccctctttctgcatacgccacaaagtggtgtaggtgatgtgaagccgttcacatacttggtcgcgcgtatagtattcgtcactctcttctgatgtcaaatcgggctgggatttctttcctaccaactcttccactaattcggaaacaacctgcttgaggtcatccttctgtaacatgataaaatttccttgcataatatattgtttagatgattatgccgcgaaattattatagaacacaaagaaagcacctcggtaaaaatcgtgttgatttctgccgaggtgcttttaacaggatagcgtttctttttaactaatcaagcgtttatgatagaatcaatatacattgggggaaagcaaggtacgcagtcttatgcccatcaacttcgcctgttcccttcctgtttgaatagttttttctgataagttcaaattatagctatagtcgccatgttcattgataatggcactataaagagcttctgcccaatcaaaaccagatttgaatccaagggctgggaacctctccaaaatggcagtatgaaaagttcggtaattgtaagagtcattaagcaaaccgccattagtcaacgcagcaaaaatataggcaagaacggagtctgtagcattcgtttccatccattcggtgagtattgtttctatcccattggtaagaagttccgcataaggttgtataagcatttcttcaagcaggacacagacttgcttgcgtccacggcgacctttagatgcctgtaaggtggaactgaccacctcttttgccgcaccatttttacccatagctttccatgcccctttggtataagctgctttgtcaaagctggtaagcattaaagagcgtataaattgcccaccaaaacctttctgccagacagacgagttttctcccatcattgttttggagagtaaatctcccatcttcacaaaaccatcgtcaaatatcatccagtagaacgcactacacatgaaaggattgttatgcaggagtttttgtttcgttgcctcttgattaaatgtagaagcaaacaaggctgtcagtttctcatggacttgctggtaattgcttccaaattgagctctattgtagctttcagtcccaggacaaaggctttcaagtaattctgtaatgcccttaatcccattgagagacagcatctctgccaagtaagacatgcctttaagaatgaaagtcatatcgccttcgtatgctttggcaaaaagatttgcaaattcttgatagtctccggggtgttcatagtgccagcgacgcaggctgagcaaattcaaatccttgttaactgcttcttgaatttcacgtttcttatcttccaaataggcatgaatgccttctttaatgtattttgcatcctctgattgctcaaatttggtcatggcatattctatttccttaagcccattgtccagttccaaatagcaatacaagcagcaggctgacacattcccatcttttatggcattagagaatttgtcaatcatctcatcggtagcaacaccttcttctgtggtcattacctccaagattatgctttgtaacgtaattgcctcatcgtctatctgtttactgtggttatcgcacaacagattctttaagattgattgaatcttgctcttaaagtctgtatagatttcttgattcgcttcaagccattcctgcattttcgcttgaagatgaaacttatcaggggaaagttccttcatattattgtccatataaacagctccgctaaatggttaatctttgagacatgccaaaggaatcactttaaccccatcgggacgagaatatgccattgttccacctgtcatcacaataagtaaatccggctcccgaataggtacctgcttctccgtcttgttgtgttcctgtataagccttttgagttcgagtaagtgtttagctccttcatcaatttcgctactaccaagtttgcactcaatgagagcataacgtccatcttccaaatgcagcactatgtccgcttccaagtcgtatcggtcatggtagtaagatacatgactatttaaatcaatggtgtacgcctttaggtcacgaatacacatctgctcaaagataaatccaaacgtcctaagttgcatacttaatgattcgggagatagtcccaaaagggcaatcggtatagaagggtcacagaagcatcgttttacactgcttctgatagcggtcttacttcttatggcaggacaccatgcacttatgttctggataacaaatagtttttctaaagccgaaacataatcatcaaatgtatctacgtgacaacttacttcgccagacgaggttacatcatctaaaagagattttttcttgaccaatgtcgaaacattcctggcataagcccgaagtatcatgctggtcagtttggcatctcttttctttccatcaataccggaaacgtcgtcagaacaaatggtttgaacatagttctttgccactagtaattgagcttttggagtacgagccaacaaagaagccggccatccacctcgggatgcggcaaagattaggtcttcgacggtcatcttagacattttaccgtcaatatcataatcaggattgttgaaaagttctttcaatgaaacttcgcccgtagattcttgcgactcccacaagctcataggcaacatacgcagccgggcaatacgaccagctccggaatgatgtatttgagatttgtcaacagcattggaaccagtgagtataaattgtccgggaatttggcggtcatcaacagttgttcgtaccgcatcccacaacattggagcatcttgccactcatcaataagacgaggtgtatctccttttaacagaatggacggcttagttttagctgtggctaaatactcctcacgcatacttgggtcttgcattctcaagatgctattggcaagttgagatgccgtagtggttttaccgcaccatttgggaccttctatcaatactgccccaaatgcgtccagtaaatcttgcagcagggcatcggctgttcttttataataattcatataatatatttttcaatggcaaagatacacattttctgcgaattgtgttgccaattcgtgttttttgtggtaattaaatccacttttttgcggtatttcattcggtatttttgctgtgttttgttccgtgtttttgtggtatttcacttggtgctcttgcggtaaacagctataattagtcagatagattagctatcatctccatcctctcctcttcgctcaagcctttcaacatctccaacaaagctttcttatctataactggggcagtttctttaggcttctcattaagcaaataataattgtactccaacatcttcgcaagaggataggcacctatatagttggaagtgatgtcactgccaccactatgccccatgctgtcacttatatatttataaggtacgacacctgaattattgagattggtagcaaagctatgtcttgcccatgttggtgatggcgtttgttctagttctatgagtttagcgacttttgccatgtgctcacgtatatatctgttataacgttggataacccatatctcctgttcaggagtaatgagttcgctcattatgggaaatacccttcgcccaagttttggagcattaccatatcggttgagtatctcttgtatctcaggtgtaacaggaaatattacttcactggcactctcgtttcgttcccgggtcttatgacgaagaaaacgcaactgtctgccatgagtggcatagtatagttcatcataagtcagacggagagtatcagcaagattttgcccatcgcctaaatacataaagaggaataatccaaggtcgcgaaatatagcatgcttttctcgcccaagaaacaactcgttcccatccttgtcttttgcctcacctgctttccagaagtcataaagtttacgcatggtagccacatcaagaaactcatgcttgcggctttgggatttattgtaacctgtgtccttgaacatttccttggtatcacctttcatcaaaccatttgagatacacatattgatgattgttctgaagctacgaagtgcgatggcaatggtcgtggtactcagtccatttttcctcatagtctttacccacttcaagacgaactccctgttaatgtcagcaaatgctatatccgtccccaagtctttcacaaagcggttacgaacatctttgctacaacgggctgaaccagccttgccctcattggtcttagattgaatgtatgaatcccacactgtaataatggtgctgtcatcatcttttctaccctgaaatctgtcttgcagcttgcgaagagagaagttgttttctgcgataagttgattggcgataagttccaccctgtccattagatttttcatgtcgtttctctctgtcagttgaacacgacggccatttttctcgtattcgcacaaggtcaaccattcttccatagtgtatgttttgcccaaacgaagaaagaccttctgtccagcatgacatacacgcacggcaacaggaagcggttgcgagtaatctcctgcttttcgtatgtcaagagtcaacgacccatatacgttgccatttgcagccgtgaatttggcgaggcacttttctccccttgaagtggtttttgcctccatttttgctgccttagtgaccttattcgtttctttcttctccataatgtgtttatttacaagtgacattctgcccttttgggtgaccttcaggtgaccttttcgcacgaaaactactgcaaacatacgtattttcctgcaaaccacaaaatgtattaagcactggcaatcagtatatttacataatatgtaattccatgaaatatcctacaaaaagactcataatctggaggtcccaggttcaagccctggctggtccacgttaaaaatcaagcacttacgagaaatcgcaagtgcttttttctttatctgcgtaaacaatgcgtaaacaaacggtttgagttggttctgtttacgcatagaatctccgtgaaactccgtgcaatcctaagacatacccgttaagatatactgttaatctgacgatacttgatggttaaataaactcaaatacattctattgcatcttgatttatagaataatatcgtacttttgtatcgcgtaatgcatttgtggcaagccatgaccttggtggtgctctttcttggaaaagaaaagtgagtttgtctaaccgccgtgggagggttatcccattccgatgaatcaatgcgtagagggagtaccagtcggagggtactctatgacaaacgaaacgcgagagttgcttcaggggttgagaccgattagcataagcccggttaccagtcagcgacagaagacagcgagattgcaccgctgcatataacgacaatgtttttatccgtctagggataggaactctgtggttatatgcagtgttttgtatatgtatgcctcacattgcaaagcgtctgtattcagaggttatgttgaacataaacaatgaatgcaatggaaaaactgacaaagtccctgtcgcttttcaaggaacggaactgttctgtttctgtcgtgttggactcacgcactcgcaggaaaaacgcgtgtgagtttccgttatctctccgtttcacgatagaccgcaaattcttttatcttactgtcggaagttctttcactgaaagaaagttctcagacatttgtaatgcgactaaatgcaagagcgagaactacaaacttcaaaaagagtggaaagatagctttgtccccaaatacaaagaaattctgatgaacctgaataaaggtggcattctgacatttgaaatggtacgccaatgtatcatgagcgatggagtgatgccattcaaagaagatacgaccaaggcacaaacctttgttggtgtatgggaacaaatcatccatgaattacggacagacgatggtggcgcacgttttaccacagcagagagctacgaatgcgcactcaaatcattcagaaaaattctcggaagcaatatgattagaggattctgcatcagtgctgcagaaattcagaagtggaaagacggaatgcatgatggagtaaaagacgagaatggggcgatagtcgggaaaatcagcgatactaccgccgggatttatctccgttgttgccgtgctgtatggaacaggtgtatacatgaaggctatctcaaagatgttccttatcctttttctaacaagaaggagaaagggcttgtgagcatacccaagagtgcaaagcgcaaacagagcttcctgaatgtctgtcagatgacggagctctacaacctttttgtctcaaagaaatatcccgaacattggtcggaagaatatacccaacgtgcccactactcattggggttgtttcttgcccagtacctgtgcaacggctttaacatggcagatgcaggacgattgacttacgatagttattattatcagacagatggcaaggctttccgtttcaaccgaaagaaaacttctcgaagaagtgctgacggttcagaagtaatcgttcccattatccctcctttacaatatgtgttagatgaagtggcggcacctccgactcggggtggctttgtttttcctcatatattaaaaggtgcggaaacagaagagttgcgccgtaaatataccatgcaggaaaactcaaacgtaaaagaccgtgttatcaggatatgccatgaagcattgaattgggacaagtccatctgtccgtccggtacatggtgccggcactcgtttgccaccaacctgcataatgccggagtggatatggattatatctcggagagcatgggacatgcttcttcagaccatgccattactcaaatctacatcgagcattatcctatcgacatacagatacagaacaattcaaagctactaaacctgggtaatacttctgaaagggatgctctgttggcaaaactggcaagcatgtccacagaagaattgctcaaactgttcagacaaccttaataccataagacaatgaaaaatttcatagaaaggataaaatcctattccaagagaaaggacactgcagatatggctatccgtgcatggaaatcagtcaatgaagaagtatataccaacttttgtaagcgcatagatgctgtggctaaaggtggtataactgttctgatggacatgtatcagatgatgcgggactgcacaccacccgaagccttgatgatgtacaattggctttcagattttgccaacgggaaggatgtaccagacatcgcaaaccgacaatgggctggccaatataccgagaccatcgcccaatgtattacaaacaaacggttgtggataggtatcaacgtaaaaacggggacaattgaactgcttacttctccgaaatcagggctgctgatggttcattctgaaacgcctattgaaatctggaatcacctgccattggcaatgagaacctacttgactgtacagttggacttgcttatgagaaacagcaaaggttgttatctgttgagtaaactggaaagaaaaatggtctatcagttcctggcctatatctctcaaattgttttcctttcccatgcggtgtttattggtggatttatggctaacctctatgaccgtgtgatggaaaagaaagaagacttggcttattgcgtgtactatttcgtggtatttgaccacggtctttcacgtatggctaagttacttgaccatctgctgaacagtgaagaggttgaccatggtgatatgcttttggtaaagtcatgcattaccatgcttgtcaatggaagtatagagatgggcacagaaaccaaagcggattgggaagatactgtagagaagtgtaaccctgaaatatggaaggaagttatatttgccttgcgaaaagtcaaaggtagacgtgggaacaaaaaggttatgcaatcattggatgatatcctcattggggacaaggaacgcatcaagcaaggaatctgtttattccttgaagagaataccgaggacataagccttgcctatctgttgaaatcattggcgaaagcgggcagaataaaagcgtctacaaagtacatggcattccatcgtgccatagaacagttctctcaacggcattacggacacgatataccacagaagcgatatggcgaaatcaaggatatggttttagacttgcctcaaagagggaacagcttcgtcaaggcaaaacgaataatagaccgatggacggactttttcatcaataacgggtagttgggaaatctagctattcgttttttactgcaaacatctgttgtaattcggtcggtaaaattaagctataaataaaccgaccgatacgcagagtttcatacactacttttgcttgtgaaatcggtttcacagagttgaaccgaagcttaaagtatctaataactaaacaagtaaaggtatggaagaaagattcaattttaaccaattacttcaaaagcctatcgccatgatgactggcgaggagctttgctttctcattacaaagagtgtagcgtccaccgaaaagtctacatccccaatggcttccaaaggcaactattatggcatagagggtattgcccgtgtgttcggatgcagcgtacccacggctaaccgcattaagaagagcggcatcatagacaaggctatcacacagatagggcgaaaaattgtggtggatgcagaccttgcactgtctttggcaaaagagtcaggtggaatccatattaaggagcagtaatatggaagataattggaaaaaagatttggtaacagacagctatggaaatccagtccgttccatcagtaacctccgacttattttcactttggatgagaatcttagtcggataagatatgatactttttgtcaggacgatgtatgtttcagccctttgtttcgcaatgtaaatggtaacaaggttgatgaggaatcggcaggaaagatacaagactatttggaaaggacatacagattacatctgacgcagaataaagtttttgaaatgctaaaaacgacctcttcggaacggagttttaaccctgtacaggattttatcatccaagagacatgggacggacagccccgcatagctacaacccttattgattatttgggagcggaggacacgccgcttgtcagggaacagacaaaactatggttcgtggcggctgttgcccgggttttcacctccggttgcaagtttgacaacgtactgactctgcctggtccgcaaggtatcgggaaaagcacctttttcaagaccatcagtggaaagtggttcaacgattcgttctcttttgccagtggtgacaaggagaaggtagaaaccataaccaatggctggattattgaaatcagcgaattgaatggtttgaagcgggcgaatgacgcagaggctgccaaagctttcctgagccgttgcagcgactatatgcgccctgcatacggacataaggttgtggagtttatgcggcataatgtctttgcggctactaccaatgagacaaacttcctgcaaggagacaacgggaaccgccgctggtggataatcccggttaaaggcaacggccatgtatcggaatggttggatactctgcaacgtgctgtccctcaactttgggcagaagcatacgcctattaccagcaagggatgaaactttatttgacacccgatatggaaattcaagccaatgaagtgcaggtacaacattccaacatccttgttgaccccatcatggaagatctggaaatgtatttggagcgtgagattcccgtccaatatgcaagttggaccattccgatccgacaggcttatcaaaagggagcatactcagaaccaaactcaacaatgacttcgctcaacatggtttgtgcccggcagattatagaggaaatgcccaatgatttggtcagacgtaatcctgccaaatacacttcacaatacatcaatcgcctgatgtccatgattcctaactggaaacggagtgatcaggaaaaggtcaaaggtttgcatcctgcctattgtgacaagaccggacgggcaaagcatccgtgggtgagagtggacgcaccaaacgaagaagtctgtacttcattaccaagtgaacaggagctgccattttaaatgtcaaactaagggaaaagaagaatatctgtccctttgtccctcttttcccctaaaaaaaggatgaaaacaaaaaacaaataaaagagaaagttataagaaatgcttgggacatgggacaaaatagttgaaaacatgagaaaggaagaacttatcaaacaactacaaaatcgtgaaccgttgctggcaaacgcggtcagccacatggtggagtatattcaagaccgttaccctgcggcatatccaagcaaggcacagaccgaatctgtgaacgattatctgcagagcgtctatgcagatggggacggcagcatgtcagagaggaaccgcgaacatcgacgtatcgcttcgcagaacatcactattgccgccatccgtgtattggatagtcgccaacttgacagactgcaagacgtacttgaccatattgcgtacgatagggagtattatatgccggagagagaacatgaaatgcaccgctgactttctcttttggctgtaccatttataaaatatcttcaaacagacagatgatgaaaacagacttgaattattgtatagtgctttcgtcagagcagcttgcgtatctggcaggaagcaaatacggcattgaccgcatgaagattctgcaccgacttattgaggaggcattgttgaaagaaaccgattatgccataaaaggtttctccacaaccttgcaagtggggcaagccattctttcagaagtggatttagctaacaagttgggctatgacaaaaagaccatatcccgtgtgcttgataagatgaaccagttgggaattgtcgtatctacgcaaagtaaccggacaagtatccacacactgaaatgtatatcggcatggatgcagaacggaaaccgcatagacaatcctttctatgtccgactgaaagaccggcaaaatgataaggaggatatgccagctatatcagatgaaggcaaacagccttctccctcttctttcccttctgtttcagttttcccacagactgcggcaacggaagattccggcggagatattccagctgacaaccagatatagccgtatcagaaagttggtgtgtccgaagctgttgtatgcagtattgcaagaagttcctatgtcgcacaaattcgcttcgcttatttgtaccacataggcatattccggcagtcgcaagctcccaccgtgctgaccctttttattgatgtttcacccataacagaacatgaagaagaaaaagaataccgacaaggaagttgatgaagaaaacgagaagaaagttacaaggcgcactctgcggcttgaagctagggtaacaaagcaggaatatacccaagcggcagaacttgccaagacctgtggcttatccatgagcgattatgtgcgccgtactgccttaggacaacatccacggcaacggttgtctgaacgtgaggtggaagccttgtgtagtctgacggatgcaaggggtgaccttatccgtattgcagcagccgtgaaatccatccaagcggacaaacgagcaatgtatttcagcgatacccgatttgtggaacaatggatgagagccgctactcagcttatcaaccgctggagccagatagaaaattaccttactgaataaattttatgatagcaaaagcctctaccatatcgcatggcgcaaatgccataagatattccgtcaacaaggagaaagcggatatagtcaaagccaacttcttgcccgatgatatttcgccggaagcgatgtacggtcgtatgatgctcgtgcagaaaaagtttgcagagaacatcaataagggcagaccgcttggcaggaatgtgataagaattgagatttccccatccgaggaagaaagccggaactgggcgatggacgattgggtacgtttgtcaaatgagttcatccgcgtatttgattctattgacctctccggcaagaccaaacgggtctcctcaaaacagaccaacctcaaagggtctcaatacatagtcgccctgcatcgtgattctaaaagtggcattctccatctgcacattgatgccaaccgtgtggatatggacggaaaaatcaatgacagtcataagattggcgagagggctgtcatggctgcgaatatcatcaacgagagacgaggctgggtacaatctgaagaaataggcatacgtcacagacaagaaatctcaggcagttgcatggagatactccgcacgatggatgaattcagttggcagaggtatgaaatggaactggtgaaacggggctataaagtgcacctgcaagaaaaagacggtggcggaatttatggctattctatcaagcgtggcaactccatttataaatcatccgtgttgggtatcgggcgaaacctgactccatcaaagattgaggctacttgggcaaaactacatccgcaggaaaggaaatccgatccggcaaagcctgttccccaacaaatacggacagcagacacgactcctgttatacaacctccgactgcttcgcagcctgttatgaagcattacgatatagcgacagacgaatatcacagtttccatgtggcgataccagaatccgcagacaatatcatacgtcaggattgctctttagaagaagcacatccgttggctaagattgaagaaatacagcacacggctcttttgctctttgccggatatatagacgcagccacaagtatggcggcttcaagcggcggtggtggttctgacacaagtagcaggggacgggacaaggatgaggacgaacttgaatgggcacgccgctgtgcaagaatggcaaacagtatgtgcaagcgcaaaaagggacttcatagataaacgaactattaaaaggtaggaatcatgggaattggaaaatcaaaaatcactccatcaataaacgttgatgatatgctgaaaaaggctgaaagcaatcatgaattagaggttgaaaagcaggatgcagacaagcggctcacagaaatccgtgaagcaaaagaggcattgttgaaaatccatcaagaccttcaggatgctattaaagctgagggtgaggctgcggtggcattacaggaggcaattagtaattccaataatattatcaacggaatttgtaatgcgattgtaaaagcagagcaaaacatgcagtttaaggcaactataaaatgcgaacatcttgcccaacttcaacaactcttaaaccaaaccattgagacatggaaaaccatgctggaaaatcatcgttccgaacaggcgaagatgctaacggaacatgaatccaatatgcgcaaaatcctcaaacgaaatgaaggcgtctggttctctgacttctggatgagagtattggtgatatttttgttcgtttatacggtggtattgggactggttgtatattgtgttagatgaagtttatatggaatgcaatccgatagtggcaactattcgcacttattcttaactatctggcaaattacaagcaagttaaaattaaaataatatttattgatttccagtttgttgcacttgcgtgattaacttcttggcaagttgccagcaagttaaatcacgtcgtactgatgcagcgacaatcttctatgtcctcgtcccttaccttgtcgcggaagatgattttgcctacagaatttcccacataactaatgtacttcaccgaatttgagccaatacaacatcataataatgttgtactatttctatatcgctaaatacaaaatccgaaagatagcacataattcagtaaatctgtcatatactgacggcgtttgtctgtaaagctatcgtagttatcgcgtgagcgacgaagccaagcatatagttctggcgcttctttgttagtgggtagcgtatgatgttgacggatataatccttcacatccaagcactttgttaagaattcatattcagttgcagaacggggatagccaagatcatcgtactttttcatagttgcatctaatagcaatttctgctcctcagtaagcacaaggacatcatttgtggcattatatagccatcgcatcagcgaggcttcttcttcacttccattatagcttggaaaacgatgatacatctctataaaattctttaacatttcaaaacgtgcctcaaaacgatagcgctgaaccgacgacgcaacaacatattctgccggataatctttcgacgttaatccaaaatagtttccctcaaactccacaaagcgctgtaagtcttcatcttccatcgtggctgcaatactcgcttttgtggtgttaggatagtgttctgttactccatcgtataaattgtcgatatgaagaggcaggttagacctttccaataaattgataagcaaatcgcgaatacttccgaagtatattccctcccaatagtcaagagcataacatgaagtttttccgatggccttaatatgcttatgcctatacaaaaacgattttatctgtgaagcatcggaatatttgtggtctgggtatcgcgtcttgaattctttgaaaatatcctcgacatgcataggctcaccttttttcgataatatatcgtataactcttctggtatgtcaatgtagttctgaggcaaaaaaagtcttccgtcctcagtaatatgaactttaaaaatatctgatgcaatgtgtgtaatgagttctttcgttgatgatttgtactggttaggaactgtaaataggatagtttcaagaggaacgaatgtgtttgtagaatatttaccatcaataatactaaagagagtatcaatgcaatcggtaaatttcaattcacggtacttattgtttataagaatagaatgtccatcgacttcttcaattttaaagtctgcaaccaacaccaacaaagaggcaaatacatcaaagctaatgggcaaatgctcgacttctatcagtttaacgtattcttccgttttctcataaatgaatgctaattcaaacatttgattatagtaatcccagtcatcgttgttaacaagtgtcgatttctgtacttctattgttccgcaaactatttgacgaactctttccctgctaagactcatcgcttcagctatttcgtttaacgaacgccgctttccgtcaaagatacccttagcaatactatatattttatctgacttgttttcagacaaacgaagataataatacagtaggaaaaacaacggtgcatgaccatgctcctttataaagttgaatacaaactgccgttgtttatttatcaagaagggatagtcacgcttcagggattctgtttgaatctcatcgtcagaaagcattgccaccctgtcaaactcacgtctaaaccgttgattaaactggaatatttccgttagtgttttcaccatattttgccctgggcaaatgttacgataggtagtcaaaggttcatcggcatacttgatgagatctgtaaaatgaggaagaaatttgtcagagaaattcttgctccttacgctcatagtcgtggaacgttgttcctgataagtcctctccaagtagtcacatgcaatagttgataggaagtatctcgcaatttgttcataggtgaaactttccattctcaaagatagttccatgttcttttgcttatattccttataaatgctgtttacagcctcttgagcattttccatttcatgcagcaccttctctataaattgcttataagagtggcgtatttctaaattctcatcgcgtgagtattcttctactacagtaagcatattgtcaaccttccccattacaaggaaatgcatactgccgggatgaggataagctgcttgcaaataggctttcacttcagaatcacctgtagttacctcgttatatgcttctgtaataatcgctataattgtgtttcctaatgcagcaaactgcaactctttctgttcaggaactattgatttatgttcccgaatcatctgattcagaattgcgtctacctctgtgtacgactttctgccaaacttgggcagttttagcaaatccactggtgtttcgatattatctaatataccccccagcgtttcatatcctgcagtattcagacaattgaaagtgcgaacagaaatgacaccatgtgtgagcagttccttgatgttcgtatctaaattaaactccatatttctgtttatttttgagtctattgcttaaaatttcttgttattcaaatatttagcaatatattgtttatcagcatattgcagaatagtttgctagtttttatgcaaatctcttgttaatccgtcacttaacaagaacccaattgcgattcttatccacgactattctttttttgcgttttagcgaggataacagattagttatcttatcaaatttttgacgctcagttaatgcatccgatagtttattatacagtaacgcttcaatttccttgcgagaagctttgtgaaatgtcgatatgtaatcgataatcaattttttgaagtagtcatcatcaaaacttttgtttttgatatatgaagttttcaaccccacatgtttcgatttgcctgcgatagacatagaaagatatatatgtggcttccgaccctcgatatactttttctttctcaagtagcttatgctgtcatcggtgagtggcttgtgcttctgaaccgaatccaacaatatgatttcttgaaggctcaggtcgggattgttgacgagtatcttggcaaagttctcatccagcacattaccttgtatcgtacattttacctgcataccagtcaaatcgtattctggcataggaaaaaaacgcttcttctgttgcatataaagtttcctgataccacctccctctgtatcaaccatcttgacattacgcatggtttcagctaaataccgatttctgtaaaaagactccggaatatcttccgtcacaacatcttctaccgacttcggaataaactgccctttgttcaggaaaaccagtttctcgtcttcatattctatcacatcaatcatactacctttcgaataatcctgatgggcaatagcattattcaaaggttcgcgtagggtaaaaacatcgtagcgcttcatatcttgaggaaatagatttccctctatcgtatacacgtactgagtattggagatcttgttccccagttcttctacggcaagtatcattggaatattgaaaatctcgaaatcaacatcttcaccaccaacttcttttttccttctataacgtatcttgcagacagacggcgatagataatactccgcctcctttcttcctaaaatgataatggctgttcgcgtaatttttccctttacggtgaatcccgttttattcaaaaacttagcgtcatcccattcggcaacctctgcttctttctgtgggaatagctccacgaacttctctcgagctttacgtattgccgcaggatcaaggtcgtctatagtggcatcagcaataataccagcagaccaatcatcctccgtcaggtactcagataaaatagctcccaatcttgacggcttcatctccacgagagagtcttctatgcgttgccaagctcttttgtgagcatatacagggcaacgaggttgatgtttcggaatgcaaattacccaaaccgtcaactgtgtatcatcggttgtgaactccaaaatttgcaacccttccgttggcagattggtacagttctccgtcaacctgaacgtggcattctgacgagtataattctcgaagttctggattcccacaatctccaaagtcttatccttaacaccaagcactatatatccgccctccatatttgcaatggcggaaacgtaagagattacgtcatccttaggtttcccattaaattggtgcttcaaattcgtaaactctttccactcacattttgcattttcttccggataattctccattagaaactcatgtagttctttttccgtcatatctcttgtattttcttgttattcttgttaattctaaattcatcaacagcgttaaaattcaacgagttacataattttcttgttaagttcgaccgacgctcttgttaagacatcacctcattttctacaataaatgctagcggtctgtctactctccttattcatattcttgttttttacgtcttaattcaattgttgggtgagcatcatactcctgttttagcttatagagttttgtaccaggtgtaataatatcttttctgtagttagtataaaaggtcaggagtgttaaagcatcttcggaatcaacagaatcaatctccttttgcgagaaaatgtttctgtgaatgatgttaagcacgttctgcttttccacttcgtccaatgttcccatacaatgcctccaacattgtctccaatgggcagttcccattgaacctttttcatccagccatttaaagaagaagcgatagagaataaatgtctcgggcatttcaagcaattcgaaatactcttcttctgttttgccaaaagcttcaaggaagaaagacattcctttaccaatttttccttttgtactattcaagatggcttgaaccgcacggatatatttacgattccagtattttcctatatagtcacggttgtgtgaatagtcttcattatcacattttcctttgcgtatcggatgatatttcatcgggaatgaatagatgttcacattcaattcatcacataattccacattgatacgcaggcgtttatacaaatctactggtctatccatgaagttgtaaagcaggtagtttgagaactctttcataccagcctttacactcatacgaattgccttgttgtaatagtaataagtcttaatatcatcaaaagcaatacggagaggtcgtatagcaattcttgctaactgagaaacgatttcttccgtgaacaaacgcgcatcaactccctgattaaagtctacgtaccttgcttttggtagtggatgctgatgcctgtcgtaaataggttgtatttcctcatatgcggcaatcaatgcttctttcttagttgtagacaatttattaatatgataacggctcataattttatacacctcataagattcgtcacctttcagtggcttcagcttctgatagaactcctgtatcaacccctggctcttacggatataagctcgatcatttattccatttttaagattgcgaatggaaatcgcaagcatattgggctgaatgaactttgcgcctctgccgaatccagaagctacaatatcatcaataatatctttcagattctctgaggcaaggacattattatccatcaggagcaaatctttttggtcaccatatacttcgcgcactttttccactcgttcgcgcatcggaatatatgaaatatacttgctctcaagagtaggtactgcacaaaatgcacaatgccgtatgcaaccacgagtcatatatccgtagaaagcgtttgccatcgggtatttgtattctatctcgtcaagaatcgagtaatcaagagggagattgtcaataatctgagtgtcgcctttatccaatattccaggagcaccaagaataccaacccaaggtttgatgcctgttgcggtttcaagctccttgggttgaatggaagccaaaacaccgccaaccatcaaatctttttttttcttgacaagcaactttgcaaagttgatagtttctactgtaatatcccagtaaaatgtaaacagtgtggttacgcccactctgtcccattcaggttcttttttccaaatacccttccaatagaagtctttccactctgttagttttgctaacagtatcaattccatatcagacctatcaattgcaatcttctcaacggtctctttttttctggtctttatatactccacaaactcgtcacgcttcaaccaccaatcaatacttttatcggttttttcaaaatcttctatgcatcggtcggctatacgttctataacaaatgtttttaagtcacctttatagaaggtaacatcccatccacctaaatttttataataagtagaaagcttcattagaccaataggagggtacttattggcataattaggttctatcaggagtactttttttctcttagatttcatcattaaattctttcacaattagcctttccatttcggcaatcaacttctggtcgtgttcattatctgggcagaatgagttcaagaccttaaacacacgacgtagcaaccatatttcacttggatcaagcacattgttcaattgtgcaataatatcctgctgaccaagtagcggcgttgatgtaggtgtcacaatacgcggaccaggaattagagattcatgctgataggttgctggttcttgaacagaaacaggatccgattgattggctgttgttggaggttctactgtgttatcagtagccgaggaaaaatcaatgtttgcttccgttggagaacttggcgcaactagcgttgtcgcgggttccccattgtccgtttggatgtcaataggtgcaggtgtaggaatctcttttttaatacttataggctcttgttggactggcactataggtcttaacttctcctctccttttgcctttgcttcaataaactctggctgatagagaagaagcattcgtttgatagcttcaaaaccgaatgaggttttcatgagtttttcaaactttcctatacctcgattattaatcagatccttcgcattataatctatagtaccgccgtgatcatctatgcgtttaataccgtcatagattttatcgatactctttttagcttcattggctttagtgtaaagggttttcagattttcaaaatatgtcctcaatccattttctaaagccctggtttctggagtcggaactagtccgtcgcgggcaccattagggcgaatatgaggatgagttacaaaaaattctccataaaaatacgagttacttctatcttctttccaataatttgtacctgatagcaggtttgcatcgcctatctgtatgttatgagctctgagacgaataccagcaagcctatcttctttaggtatctgtatagtgtattttgtgagggcataccatccccaacccaaaattccaaagattctatcttcaattttaaaatattcaagattgtttattttgtctttcgtcccctttatagacaggccgtattgcttctgaattcttgtttcgccaacaattacttgaattttctctagaccttcgtgtcgttctttgaattctggattatctgctgtacttttataaatcagcatattcttaaattctggcttatattcgacaggagcgacttctcttaaatagtcaatgattgcatttacatctaatagtgatggcgcagcatcatctttgacaccattcaattctacttcgaaataatggtcggattcctcagcaggaatagattctctctttgtacacttattaatgacataggtcgcaaggtagtcttcttcctccttttcaaccatctgccatattttatccacatcaaaagtaatctgagtgccaatagcctcaccttttgcggaagtacggaaaattagttcatgacaatagccaccaccaaccaaacgaccaatgccatacattcccgcttgattaacaccgtctttgtttgacggtgaaatgtcgagcaaagtgcgtacggcatttgcagattctatgcctgcaccattatctcttattttaattatcttgtgcctctcatctatgtcgatggtaacaataccatctttagcttgggccaaaacatgagcgtctatggccttattgatagagtcaagggcattctgaacatactctcgataaattgttttttcatcggagtacagttgaaacatcagcatacttaaaattcttttccttacttcggaggagtaattcaagttattttccataattggtgtgttttagccgttgggaaattgtttgtaagcgggtcttgggaatttcacattcacgagagagcgtaatgctggattggatatgatgtattcgcctggtgataatcgggtcatcatgttctgataaactttcggaatatatctgtagtcgggcttagaaacttcaatagcgtttgtcctaccgtaggcttgtgtggcacaattgcctttcactctatcgtgaatggcactacgaaattgctcgacagagaaaagaatgattcccaatgagcggccacgttctgcaatatcaagcaattgtttcaaaataggagagttcttcggagaatcgcttgaagcatatttgtttaactcgtccacaaataggattatcttgtctgggatatcatttctatcaccatcaagtttcaagtcatagatagcacgagctactgtaccgaacacaaaactttgggtattgccgtcaagtcgcgcaatatctattaccataacattgtttgccctaagatggttttgaatctcgtttgtcaagtcaacttcattaacgaggcttttaccgaaaacatcatttgaaatggctttgcgaatgcatcttttaaattttctccagctcacaacctgtatttcttttttctcgtctgtagtaccacccgctttagtatattcatctatagtttctttcagagtttcccacttttcaatgttcttaaatttgccttcttcgttcataataaagttggcacatgcttccaaagtgtttgtggggtcttcttcattagcaagtaatagatcgagtttgtctttgttatcggcgaatgtgaacttatatataaaagctttcttattcctcttctgctgctcaatatcacttggcgcagcgtatgactgaacctttgccacatcgcttttgctatagggatagtaatagcggacattctcaaagggagtgtctgttaaaccaagatctgaatatatctgtttatcgtcgctactaaggccttgatttggctcgtcaattgccatcagatcacggcctttcacgttgaagaatacaaaagcacatgtgtcaccgttgtctgtacgaaacttactctgaatggctctgagcaagaacatagaataagatgtcttagctgccaaacctgagatacctgagatgttgatgtgcgcaccatctgggccaatcaagaaatgagaatctaagatgacgcgaatcttaatcttgtcttcgcccttatacatttcaaggtaaccacagacaagcggattcttaacgtcatcatcagtcaaacctaatgctttctttacttcttctggctcacaaagtgatacctgtttaccattaagaacaggcgtatatatacctgctgtattgccgcttacacgcgcacgaacatagttcattcctaagcgattcatatttccaatcttctcatccgtgctgccgaagtcgctggaaatatatccagtaaaatggctaggggcatctgtgatatgattaatttcctcaatcacgccgaatgtgattgaacccgattcatggttcaccttaaccacatcaaacgggctaaggatttgcttcttgtctgtccagaaataaaactcgtcaattgttgacggacatttctcggtagctgagacttttcctattatttttgccatttagaataaatttaagatgatgtcagaattataatactttgatttgcagaaggtctctgtgaggaataccggataaagatgattggcccaacgggtgtcgttgccgtaacatacagggtaggcctctttgataagattcgcactaatggtgtttatcaggtctgtatcaatctgttcatcttcgttaatgataaccatctcacattttacgacatcagagaaattggtttcacggaaatcgctattacgcagacgtagataccaaacggcatattgaacgccgtttgcttctgaagtatatcggtaggccttagttcgctcaaagggtttgaggtttgctattgttttcgatagacggtggccttcataatctggaagtagttctggatcaaaacgctttgatacaccaacaacgtaacgatagttctcacgaagcatagttttgtctgagcggttgacgtttgagaaactggggttgtactcaagtgagccgtctttaataaggtagtgctcatcgtctagacggttatgggtgcaaagatcagccactaatcgttgttcctcatcggtcatttctgcttggatcttagccgttcctctattcttatagttgtccttatcagaattgaacttgtctttcttatctgttttgtaaagcagaattttgtcaatcttgatgccaatctcaccaacataaggaagcctacttaactcctcattaatttcatcacaatagagacggcagaaatcctcgccttcatcatcaacatcgaagtcatctggcagggatattactattttgtggtaagtttggtagggatggaacgtgtcgcggtctttgcgttcacagcagccaacgactatctgaccagcaagcacaggaaaaattttcttgccaatagccatatcgtcaaccttgtaaacatggcgtgaaccatcaaggaaaaaactgaatatgggacgtgaataatcaatgagcatatggtctataaccaccgtaggcacaagggttaggtcagattctgcgatacggctcttattacgagttgaagcaggtttgtcgtcgtaatccagaacatctgtatctgagatattcaggctcaccttattagttttatagcaaagatagttgccctcacccctcttgacgatgtaatctaaaattttgcccatatttatttttggtaaatatcattctactacaaagatagttgcattttttaggagcgcacaagaaatttggcggaataatttttaaggcttgacatttaacatattttgattgtatcctattcgattgtaactattcagtgggcataatcaaatcgcttctctacattgaaccatcttccttaagctcttattcaattgacagactttcattagaatgaatctcaaagatatcctttattgcattttgtcaaatcaatgtaactatgaaggcagcaaaaggaggcgtttcaatatctctttcgtaaaatttgaatatgatttcaaattggtcattaggaaatgccttatggatatattatcaaatatgtccaaggtaagatacaagttttctgccacgctgccacttggaatttttagaggtctcaaactctttcttgctatacaagataaaggagttgattttctgagctgagtcgtacttgtattctttttcagcaaaagaacagatgtgttttcggaaaaatgttgattctgcgtaaacaatgcgtaaacaaactatttcagttagggggatttagtgagtttcatcaagagtagcaagctacataactatttgatattcaataaaaactaaaatcgttggttatcgtagaatatcatcttatcgttctcataatctggaggtccctggttcaagcccaggctggtccacgaagcataaaacaaagaaaatcaagccgttacaagcaaccttgtagcggcttttttcttgcacactaaaactccttgcacacaatttgcacacaacctttggaaagtggtgataatcaatgataaacgtgacacaccggtaaatgatattctttttcttttagtttcttctattggcaagagtgctctccgatttatgcccatgatgaggttttcgcatataatttgcacaaacggatataagaaaagagataagctacacaccggtagtcatcccttttcttctcaaaattattttttgattggggaaatgagcttgtattctgcggctatttcaaataagcggtcactattatatcgataccgtccaattatcatagcggaatattccctatcagtttcatcataatcataattgggataaaaactactgaccttatgaaataaagccctaccttcctcaccaaacatattcttaatgatattgccaatggcaatccaatcatcataataataagtaatatccacttgatttctggttatttcattcaatagccgctcaaccttttgtttctttgttaaaggagtggcactttccaaaacaaaattatttggacgaagaaaggtttctatcgcattggggataagaagcgttcggggtttaggtggtttcgttttatatttctgttttggcttataaatatattccactgcatttgattttgtttttggcttagacgtataaacttccgcatgtttattgacatacggttgcgtatcatgcgaaaggaagcgtaaacggcatatatcgccacaacttttatctataatgatacccatttcttcaaaatcgttttttatggcttcaaagacattcttatgattagtagggtccgcataaggaatgatacagaacaagccatttccgcttgcagacaatccacaatacataatataaggtagttcacccaacttaatcttaaggtcttctatgtttgatattgacgggttatcttttccgtcaatatcaatacaaatcaagttcgtatactcgtaaattttttcagttcgtcgttcagaacaaacacaactgacagttattgcaggaagaagttctttcaattctcgccgtttcatcaaatcagattcatttcgaagttctttgattaaaacagtacgatagtcctctaagaacaaccagtcccataagttcactactccgcttgcataacgattttgcgcactttcaaacattgatacttttatgatattttccatatttcttacttttttacaggccatcaggcaatgaattttctacaaattgtttagcaatattattacttttcacaaaaatataattattcccaccaccacctttctcaatctcaaatttcaaactctttatgcgagttgaaaattcttttcgtctcacaggtatcaacttctttatacaacaatacgcattatattcttctctaaaatcttttaataaaactctatcattatctgatacagaaggcacgtatttttttgcctctatgaattgtgccacactatcagattcaaatctcatttcctcaagaagttcttttgcctttggcgattctgtaaattgttgttgcttcaacaaccttcccaatccctccagcacccaattgaaaataccgcttaattctttggatattattttcttggcgagatgtttatcttgtttttcatccggaataatcacttcaaagttcaagattataaatcttcgcaagtaggcatgggtaaattcaatattattaggaaatttgttagtgttaaacataaactttccataattccgaataataaacggatgtccataaggagaacgcgcatcaataggctcattgctgattagcttcttgaacaagtcaggattgatattctttcctccgagttctgacgaatagttaagcagataattacctaattgtgccctaaaatatccattttcattacataaattacttatcgtataggaacaagtgttgtgttctccaagcagtgcttgcactatttcaaatatgacggatttaccgttgcttccttcacctttcaaaatcaaacacttttctaatttcaagttttgagtaaaaatatatcccaaatattctgcaagaatcatttgtgattctttttcaggtaaaacctcattcaagaaagccttaaaatcatcacaagtcgctttagaattgtattcaaaaggcaattgatatttaaaaaagtcccgcttgtcaaagtctctcaactcttgtttgtcctttgaaatgacaaatgtcccattctttagattaattttcacctcatcttttttctcattcaagtccggtacaagagtgcaaagagcgacaaactgattatacaatctctcaagattcctactcagtctaatatcataataattgaagtctgccttatttgccgctacggcaagaaattccttcaaaagtggacgggttatgtttttccagtaacagcccgtataaatatatggctgaatactgtccggctcaatgccgagccccaatttaaactcatccgcgttcttcattaattcttctatcaatataatatatttgacttcatcatccggctctaacccctttaattctcttgtttcattttctgacaatcccccattgttttctttcctacgtagttctgcaagtttttcaagttttttatcatcatcaagatgataaataaccggatagtctatttttgaagatatatctattattttcttcaatgtttcctcttgttgtacttgctgcaaaatatctcttacatatcgtttcaagccttttgctgttttatacggatgatttatcattggaatattattattgttgctattactattcatattatttatctcctatctttgttgagccgattttataattaattgtattgattgagttgaaagattttggctcgttttgccttcctcctcaatttggttgtttaaccatttatccaattcttcagcaaagaaatacagattacgtcctgacctgtgacaaggtatattatctgttgctgataatttatagagtttcgatgaacttaatttatatccttgtttttgaatatattttaaggcttgctccttattcagccactttggtatttcttcccttttttctattctgtttatcagaatgttttttatctctgatatttcctgaatcagataatctatccgttccggcaacgtgtcataacttgttttttgatgttccataccttttgttttttgtttctggtgcaaaaatacaaaggtccaaaagcggcataaaaaggcacgttcaggcacattcaggcacgtttgtatcagactaattattagtttgttacatatattaccgaaaagaaattattgattttggcacgttcaggcatgaaatatatttgattagttgcttacgttttgtatttttgtcataaacatcatgtagtaatatggcaaagaaaagaataccgatagacaaagagaggtttgaaactttaaaaaacgagttagtaagagtttctaatatagatttgagttcagataatgcatactctgacctatgcgattatataaagaaacagagcaatacaaattttcctctcccaaaatatgaagacggaagcgttatccagcaatctgaaactatcagcgttgatacattacgtcgttattggggagataaagatgcagacaaggaaagaaagccggatgttggaaaattatctttcatggctcgtgctttaggatataaggattgggaaacattctgccacgaatacaaacagaccaatacggactttgacatagagaaaggattcaatggaatggactatttcaagttttcatcattgcttgaaggtgaaatcgtctgtatcggctggtatcctcaaaaatattgcagattgaagtttttaggagagtactcttttgaggtcgttgaatcttatagaatgaaaagtgaggttggacgcaaatttgaaacttccggttttcgtctcgcccaaatatcagacaaggctatttttccagaagtcttaatagagccattatatgaatatcaagaagatttatggaatgccatagaaaactttgatataaagaattgccctacagaaatccttttataagaaaagataaaagtgaataaagtgagtaaagtgaactatatttttataatagagcatattcttattttatagaccatataacgatataaaactttatactttttataaaatatagttcactttattcactttattcactatgtaatatttttctacttttatttattctttcatattcgagatatgctcgtgcttctttataccgagtattagaggcaggagaaaagcacgatacaggagacgaaaacagccttatttttggtatgggaaaataataatcttacgtctatttggaagcgaaaaggatatgcagaaaatcgtttattcttgtgaaaaaactattgcgtttcgtgagtttcatattgccttctcctaaaagtagccaccttgcatttatagacggaaaggcaatcagtatcttttgcacaatccagacggtaggaagttcttttctgaataaaatgttcatcagtatagtaaaagacaatcccgttctttgacaaaaatcagaaacggaaggagattctttttcggcaacctgtttgattctggcttgtatgccaccattcagaacatcccaaaaggacaaaggcaaattgatgttctttatatgaaccgcttctttgaataacggtgcaatctcaaatggcgaatgtttggatattccgcatcctatctctgtaactaaaaaagtatattccgaatgttgttctgcatatagtagaaaatcatcaatatgttttttaagattctcaatgtgtttggaaggcatcgcataggtctgtccctgtattcccgcagcctgtcccataatagcaccgaatttcatcgctgttgctgcggcatttccattatgtacaccgtttgagtttgaaccgaacacaaatatttcattttctttcagctccgtaatgttggatggagtaattctttcgttcatgttttaaagtttttgggtataaaaaatcctcttactacataagcaataagaggattctataagtgtattactctcgattattatcagttcaacgaaataagattaataattttatttccgttgtcggcaacattatcgattaccacttcatctgactctgtgatgattcctacaacatttgcaccatccatatatctaataccactaaatgttatattggaactttctagacttgcaaaaagggtttgtatttcatagtcatttattctgaactctgactcttgataatccgccatgctcattttataaaagcgagtattattttgtatataccatgctctattcgtttggaaatgcccctcaactccttcatgccaattaaaactatttggaagttctactgattgatatgttgttccatcaaattcatagtaccgaccataattggtttgtaatagaacagtatttcgggcgtaattatatataataccccaaatatcaatatcaggatattcatcgccaccctctatcttacagatttctgtttctttcaattcattattaccaaccatttcccatttgataatctttttatcttgatatgaatatagttcattgtttataacaaaaggaatatcagtaataggatatattctaccacccggacattttaccttatagtttttattatcgccataattattccaatatataatgaatccatctccagtaacatcaaaattcgtgaaattttgtccatcagctaacattggttgtagtgtaaatttagaaacatcaagcttataaatctcctgaattcaaacagacaatgcaacagtgtcgaattcattgttagttaataatttatatttttcctttggggtcatgtaacccaatctttttctcggtcttgagtttaagatgttttgaacgcgcattacctgttcattggttatgtccctaaagtccgtacccttcgggaagtattgcctaatcaaaccattgctgttttcattggctcctctttcccacgagtggtatggttttgcaaagtaaacaaaaatatttagtttacgtgcaatttcttcgtgaaaactaaattcttttccattatctgccgttattgtatgtatttggtctctaaaaggttccaaggcatcgatggcagctttagttagcgggctggcatctttcccgctaagtagtcttatccatactagtccagttaccctgtcgtttatagttaatagtgctcctttgtgattcattccaatgactgtgtcaatttccaaatcaccaaaacgtactttcttgtctactatcgtaggacgcttgtctatgtccacgcggtttttgataaaaccacgtccattagtcaatgcacctctcttcttatgacttcttccccgtcttcttaaatgcttgtataacaacttatctccatgctttttatcttcccaaatatactggtagattgtctcatgagaaactgtttccaagccctttgttcgcataaacccagtcacttgttctggactgaaatctttctttatgagtatatctacttgaattttcaagtcgtccgtaaacttcacgaagtgctttcgtgaacgcattctggacatatacttagcctgagcgagatccggtttgtaaatgccattacgtttatcactattacgacgtaattcacgacttatagtgctacgatgaactcctacaagattggcaatctcggttcttgactttccgctttgcagataagcggaaatgttatacctttgttcttcggttagctgtttcatattgcaactgaatgttggggaactggaagatgcaaagaaacaacttttccacaggggaacaaaagggaaagaaatcttctttctctgttcctctgaaaaattattcttttcgtatcttctcattgtcatcattctcactcctgttgcattatccgcttgaacttaggtctgatgattattcgttgcaatataaatgtttccttgattgtccaatactgtttgcaactctatcccctcacccaaatatacatctatttccttgggccatcgatatatcttttctgtttggacatcaacaatggagaggtattctgtactaccccaagctacacttatacctaaaccatcaggttcaggtttatagaacaaatcgataatatcttgtgcgataggatttacaagaagaactttatcgctcaatttcaaaactttatgaataccaatattatggtcttgaccgtcttctcccttgattgataactttacctcattacctgataagtcaagtttgtaataagagtcgtcccctgttgctcttgttgcggatgatttctgataaatcatcttggcgtcactcacattcaaattcgtaaggtatttataaccttcttcataattgatattgccactaccggaaccaccgtcatcactacatgcagtaaataaagctaccgcacctaacattaataaaaatttcttcataattaccagtatttattccattcttcccgcccacacagaagaagtttataaaatgcgaaagcgtgagggctgctaacttattttacggaataggctctggtaaaacccttgaactaaaacaagcaacagtctccccacgccatatatggatatgacgcgagagatgctaacttattcccgttcgttaatagtttaccagactttattccggagaatcagttaaacactttcgtgtaccttaaatttctaatatgtctgccatgttgccatgaccatgcaaaattagaaaaaataaggcacatcacaaagttacatctcataaagagactgttgcaggttgcaaaattagatattcttattcattcagcatttcatcaatggcgaattcgtgaagttcatgctccagctccatttctttaagccgttcttctttcttctgaaaataatcatcgcccaaatctttttcttcgagtgtcttgtcgaatttatcaagtatttcatctgaaacacattcttcatcgtcattatcgattgactcgtccaatacagcaagcatatcctccattgtgtattcctgttcttgtgaagaagtatcttccgttaatgaaaactctgtatcatcctcacaatcaatatccggccctaacatatctataagctcatcgattgtataatctttgtctttaaaagaatctttcgtattttcttctttgacaatcggctcttgaacaccggtttcctgtatgctttctttttgagcagacattttagtctttggtgctttctttgaagatttctttttagtctctacaacttcggcagtcaccggttgttcttcttctacttttttctttcgtgccataactttatttatttttgaatttagtaatactccgaataaatgaatcatcggacattacatatatcctcttttttgtcggaatataaaagaaaaaggtattttaactatattcttaacctgaattaagctctcgcaccggtaattttgcataaagaaagcccggtttcctttatgaatagaattaccgggcaggaaagtaagaagagccccatataggctatataggctacaaaaacgaggtcaaaaggttagtgttcttagcacgctcctctttctcgaaactcgccagatatgcttccgtagtcctcaagtcggtatgtcctaaggattcacttatataagagatattggctccgcttcgtttcaatacggtagcgtatgaatgtcttgcggtgtatgtggtgatattgccgatacccaattcttcacctatcaacttcatacgtttgttgattcgcttgacaacatcacgtacaatcgctttacgctctatggctgtctcatgccctttcatataaggaaatatgtaattatcgggtaacggtttgttgccccacttgtcaattattgcctgtaattggggagaaacaactgcacgtatctctttcctattctttgtcgtgcgctctgttttctgtctcacaaaacatatttcaccgtccacaatatccgagaacttcaatttcagcatgtctgtcggattgataccgttgcacaagtaaatgaatatccagaggtctttatatctgttagtggtttcattttcactcttataatcgaaaatggccttcaactgtttctttgtcaatcctttctttcttccgataccggtctttatctcgaacagaccttttccgaatgggtattgcgattctttgataacgccggctctcttggcttcattcatcaaagtacgaatatttctcatgtgcataccgattgtagaaatacttctcgttttcgaccaaagtctttcgcatttttgtaaccattcaaccgtaacagtactaaatggaatatctttgccgccgacttcctcaaccattaccaatgtagtttgatagaactgcattgtcccgattctttcttcgtttttcagttcctcaatcttagctcgtatggcactgttcagagtatcaccggtagcttttcccaaacgcaaattgagcgtattaaaagagaatgttcctttctctgccaaagcttcaacattcatacggactaaagaaaaactactttcaatggcttgtctgattttcttgctttcagaagatttgctatccgggagtttgttccattcttctttcgtcatgcagataccaatagaataatacttgggctttctttgataataaaccttgattttaataggatatttgccttctttgttggcagtacgtgcatcaagtaccgtagagactacgataccgtcttttgaaaaattatacatggttttagtgattacccgcaagcggaattgcttacgatagtctatatatcctcatttgaatggaaatataaacgttttgaaaccttttgaatattggttttgagtagtttagacattagtttcaaacggtttaaaacgataatagcaaaacatagtatatatattagtctgtaaataagaattatacgcttcgctcatttcaagaacattattgagaagtatcactaaaagtcggaaaaatacagctatcgataaatagataataaaagttaaacattcaaagccattgaatccgattcttcaattttaaagagttcgcattgattttcagattatgtttgaagattccgagcataaaataaacatagaaaatagaataagtgcagcatattaattgaattaaatggtttgccaatcattaacacaccaataattttgaaaagatgtttttcacgaaacaatatatccttttttattgtttatttgaaaaactatatcatgtaattatcaaatttgataatttattctatgatatatattatcataaagaataaaatacttatctttgcagaaagataacgaattgcatgaatatctatacagaagatgaagcactaattgagttattggaagagggttgcaccaatgacaaaagatacaagagacttcctaaggatgtaatcaaaggttatataaaagcatataatcatttaaaagcagccacaagaatagaagatttattcagaatcggaagtctgcattatgaacgattgaaaggtgacttaaaagactttgaatcggttagatgtaccggacgttggagattaatatttcaaagttccacaatagacggttcattgataattactgaaatagaattaatagaaatatccaaccattatggcgactaaaatcaaattaaacgattgcgtaccttgtatagccattcatccgggtgaaatcattaaggatgaattagatgcaagagaaatgaagcaaaaagaattggcttcacttatgagcatgcctacttccgtactcaatgatattataaagggacgtcgtgctgtaactcctgaagttgctgttttgctacaggaaattttaggaatagatgcttcatattggttatcattacaaaatcaatatgatatagaccaagcaaatataaataagaaaatagtagaacgaaaaaagaatattgagatatggaaagtaatttctcaatattgttctgtcaaatatttcgagaaattaaatgttattggaacgaaaatatcagaaaacataaaaataatatattcaattttcggcgtaacttcagttgaagaactaatagcttcgttttcttcagaaaaggaactttcttattttaagaaatctgaatgtttaaagagcgacccaattaacattttctcatggaaacattttgctttctatcaaagttcacaaatgccggatgttgccgattttgatgaaaacagtttagaaagacttgtgcaggaattgaatcaaatgtttgttgtaaacataaacactattgataagacaaaagaaattctgtcacgatatggaattaaatttattatagtgtctaaattcgacaaaacaccgattgatggattttctttttggcaaggaaaaaatccgaccattgtattaacattacgattaaacaaaatcgataattatgctttcgctttattgcatgagatataccatgtttatatgcatcttattaacaatagagaacagaaatacattgccatagaaggagctgaaataaataaatgcgaggaagaagcaaacaaattcgccaagtgctctttaattggtaaagacttatggaatacattcctcaagcaacattccatgatttctccacatgcaatgcaaatgaaaataaaacaatttgctcatcaacataatatcaatgaggctattgttttaggattttatcagcatgatattaatttgtattctattaaaagctcaatatcaagagagataaaatagaatattcaaatacatttagtatatttgcaattaatatgacctcccacgcttcccatttgaatagcgcacccggggaggtcttcgagttttatataagatgacaagcttcctattattgtaagcattcgaagaaatgcaccttttacactttgaggtttggttgtagctttgcggcagtgaatacaatcaaacctcaattattatgaacagacaagaatttgaagaattagaattgcaggtgcaacaaagcgagctgccgttgaagtcgtaccttcaacagataggtgtaagttattcaacctatcactactggcgtagaaaatgttccgttgacaggagcagtatcaaacacgagttggctcctatcagttttaaacaggcatttacggagtcttcccaagaagaacaattgccgcatggtgttgcgctgctgtttcccaatggacttcgtgcccacttcgggagcggttctgaagatttgctgaaggaaatatttacccaaagtcttcgagacggtcatgtttaacctgaacgacacgatgcgctacttcctgtgtcctggcaggacagatatgcgcaagggtatcagttcgctatgcggagtggtacatgagaaaatgaacagtgaagtgaggaacggtgatgtcttcatcttcatcggttccagccgcagactaatgaaactccttcatgccgaagacggaggtatggtaatgtatgtaaaacgtttggaggccggtcgcttcaagctgccggagtatgatcccaaatcaaacagctatcccatggagtggcgcgatctggtgatgatggttgaaggaatacaggaaaacccggaacagaggctccggcggttaagagccgaacgtaaggaataccatgtataacatgttttttgcgtgagtaaactttggatattgttgcataattcactgttaattagtatatttacatcattaaaagaagtatagacaatggaagaaaaagaaattttactcaagacgatagaagggctgaatgcctctatagcctcattgtctactactaataagaatcaatccgaacagataaaaaatctgcaggaacgtatcaaggagttgacggctcaggtcgcatggctgaaccgtcagctctttggtcgtaaatcagagaaacttcgcgtatatgatcctaatatgccagacctctttgccgacgagttttccggactccggcagcaggcggaagaaaagcgggacgaggctgtggaaaagattgagaaggaatcggtggaagacgtaaaacgaaatcgtcagaaccgcaaaatgatagaggacttgcccgtattggaaaccgatacaatagaaccgaaaggcgtagacttgtctttataccgtagaataggcgaagagataacaaaagtcgtcaaacacaagccgggaatgctttacgtcaaggtgatcatccgtcccaaatatgctctcaaggatagtaccctgcttcctccagccggacagaaaggcgtagagatagctcccatgccgctgatgccggtcgacaagtgcattgctgacaccagcctgcttaccgagatactgcttcagaagtatgaatatcatgtcccgttctaccgtcagatacagcaataccgccatcttggaatgaaaggccttaccgaaagtacactggacggctggttcaagaaaaccgtggaactgcttaagcctctgtatgaagaactcaaatgggaagtcttctcctgtgactatgtacaggcggatgaaactacagttccggtcattaacagagaaaaacacagagccgacaaggaatatctctggatggtaagatcagtcatggagaaactggtcatcttccattacgacgggggatcacgggccggagcggtcatcgaatccctggcaaatcaatataacttcaagggatatcttcaatgtgacggttttgcaggttatgaaacagccttcaagaccaaccccgacgtgcggctactcaactgcctggtgcatatacgccgtcattttgagcaggctttggatgaaaacagggagatggcgcaacatgcactgactcagatacagcatgtctataaaatagaacgccagtgtgacgaagccggcctgtcatatgatgagcgcagacagacgcgtcaggaactgtccaggccaatcatggaggcaatgaaggtatggatggagacagaaggaattaaatacagtccaagttctttgacaggcaaggccataacatatgcctataccaaatgggataatattatgagatgtctggacgatggccgcctgtactgggacaacaatctggcggaaaatgtccaacggcccatcactctgagcagaaaaaattttcttttctgtggtaatcacgaagctgcggttaatatgtctgtcatatgttctctgctggccacatgtaaggcgcacggggtaaatcccagggtatacctgaacgatgttatcgcacaaatgccttatcacaaaaaggcaacccaagaagaacttttgaatctacttccacataaatggaagttgaaacatccggaatgtgtactgacaaggcaaaaggaggaatcttgtaactgatataaattgtaacatatgggttcaacaaaacaatagcggctgatactattaggttcatagtgacagtcgctattgttgtatataaaggtttaatacctgtagttggccgaatacttacctattattgatataacccaatattaccgtacaaatctaattgcacacaatttgcacacatcttaggaaaatagaagaaaacaagaaatattatttgaaaaggaaatattatctttgggcttggaaatcaagatgtatggatatgaaaagatataaaatgcaaatcgctgaaaatcaaatatttgcgactcacaatctggagatccctggttcaagcccaggctggtccacaaacaagaggctcattcttaatagaatagagcctcttttaatttttggactccgctatacaagcccggtatttgtgtaataaaacaaccttcatcatgaaatacggagtatctccaaatacactgctcataactgccggaaccatatggtcattggcaggagtcaatattctgcgtataggcctgacctgctggatagatgacggacattattggctattcaaagtctgcgaagccagcctggtattcctgctattcttcggcatcattttccataggctatacaagaaacatactctccgtatctcacagaagaaagggaagcactgccccttttcctttttcgacgtaaaaggatggattgtcatgataggcatgattgcaatgggaattgtaatacgtacctgccaccttctgcccgactccttcatcgcagtgttctataccggactttctctcgcacttctcggcaccggactacgcttcatctggtattggtggaggaacagataactccggattcaccgattcccatccggcattcatcggtttttctgccggcaatcacccggaaagtatttggcagcatgcaagttagccctatctttggaccatcaatcataaaaccagaaacaatggaagaaaaacaaaaattcccatcccatgcaggctccggcaaagtgctgaccgcctcgctctttatcctttcaggcctattgctattcgcacgcaatatgggtatcatcaccaaagaatggttcaatatgctggttgcctggcactccttatttataatagcaggtatctataccatgatacgcaagcactatctgtcaggaggtgtcctattgctggcgggactctacctcttgggaagcaaactcatgctatcccccggcaatttccaagccatgctgtggcccttggcccttatcctcatcggcattttctttctcagacatcaccataggagaaactggacacaccaaaggacagtgcatcgccgtgccaagatggtacaacggatgatgaacaagagaatgggagagcaagaggaacaacaatgccagtctgacgacggattcctctgctccaacaactccctgagtgccgtacgccacgtcgtactcgacgagcttttcaagggagcgaacatacacacctacttcggcggtactaccatcgacctgcgccacacgaacatagcacccggagaaacctatatagacttggactgcagttggggaggagtggaactgtacatacccgccgactggcaagtacgcatagaatgcagttgcttttgcggcggatgtgaagacaaacgctggcaaggcacacctgccaaacaagaatggtgcgtacttgtgatacgcggaaacatatccttcggaggtcttgaaataaaagattaagcaatggaagcaggtttattgtaggcaccgtctccatgtatagaacgaatgtcatcgtagcatcgccggcattctcttctggctggctggtagcttcatgatatgcaacataatggtaagaatagccggaatagcatacatcccctttgcccccaccattcctttccgcctcttgttcggtattcttgcctggatcgctatccttttgtggtatcatctgcagattgtggcagacacttaaacagaagatttcaccgcccccgaggcagaaaaggccgctcccctgccacaagaagaaagtattgaccggatcacggtaaaagacggctcccgaattcacatcatcaaagtggaagacctattatacatccaggcttgtggggactacacaaccctggtgacacccgacggagagtacatcaaggaacagaccatgaaatacttcgagacccatttgccagcagataactttgtccaaaattatttattcctttactttgctatgatgaaacatctgtattacatacttatgtttactttcctctgtctgggtttgactgccatctcccaggaggaacagccaaactcacggaatactgccgggagtccggcctccgaatgctcttttaccgcctacacacaatgtgcatcgtacacagtcacccaccgttcacttttcaatgacgaaaataccgactgctggaccaacgaagcgttgtgtccgaacagtctatacacacataaccacgcctctccgaaattcttgaagatgagaattctgaaactagccgggcaactggagcatctgctttccagccatctgtctgccggagagagcgccaacctttcattcaatcccaatgctctccgctattcctgcggatactatatctatgcactgctgcatatcctgatttagactttatcggacttattgcaaaccattaccggaggtgtactgcatgtacatctttcgcttttttattatccatttcatcacattaatatcataactatgtccgatttattcctccccacccttgagatgatggggctcacttttgcaatcggtttctttgtggcattcatcatcaaactgatagccagcgcagccgattcactcgatttctacagttcccaccagcaggagttactccgcctgcgccgcataaagaagttccgccagaagatggaactgatgctacacaccccctccatgcacggaaacatcttcggcaacgacacgcgcgaagactacagccggggggtggaccgtgaaaacgaaaagcctcgaggctattaccacggagtaagccacggtgtctccaaaagaaacctggtagactacttctacccagaagatacccttatgatgtatctggaagatgccatcaaccaccgtgacaacaagaacaagactaaaaagaacaacgacaccaaaaacaaagactaattatggagaatatagattttgcaaccttgttccaaggattcggaacaatgatggaaagcggctggctactctcctctgcccgtgtatttctaatagccctgggcctgctgctcatatacctgggatggaaaggcgtactggagccgatggtcatgattcccatgggactgggtatggtcgccatcaattgcggcacccttttcatgcccaacggtacattggggaatctctttctggacccgatgctttcggatacggacgacttgatgaataccatgcagatagacttcctgcaaccggtctacaccttgaccttcagcaacggattgattgcatgcttcgtatttatgggtatcggcaccctgctcgacgtgggcttcctgctgcagaaaccgtttgccagcatattccttgccctatgtgccgaattgggaactttcttgactgtacccatcgcatctgcattgggactgtccttgaaagaaagcgcttccgtagccatggtaggaggtgcggacgggccgatggtgcttttcacttccctagccctggccaaacatctgtttgtacccatcacggtagtggcctatctctatctgggactgacgtatggcggttacccctatctggtgaagctgctggtgccgaaacgcctgcgcgccatcaagatgacgagcaagaagccgcccaaaaactatgatgccaaagtaaaactggctttctcggctatattgtgtgctgtactgtgttttctgttcccggttgcctcaccgctgttcttctccttattcctcggagtggcagtacgcgaatcggggatgaagcatatctacgattttgtaagtggtccgctgttgtatggttctactttcatgctcggcctgttgttaggcgtactttgcgacgcacatctgctgctcgaccctaaaattcttaaattgttggtattgggtatgggcgcactgctgctctccggtatcggcggaatcattggagggtacatcatgtacttcatcaagcggggcaattacaatccggtcatcggaattgcagccgtgagctgcgtgcctactacggcgaaggttgcccagaagatagtaagcaaggacaaccccaattccttcatcttgggagatgccctgggtgctaatatttcaggagtaatcacttcggccatcattacgggtatctatattactataattccctatctgtagcctgcgtagtgggtttaggtgacggaaagaggttatggcaatcacaatctctttctttttatgatacatggggcaagctgttgcatttcagataaaatcctttacctttgccggcaaacacatttatcaagatatcaggatgaagaaagtacttaaattggccggaggattcatggtcggggcatgcatcggtttcgtaggagtaataggtgtaagagtcctagttttgggagactcgttcgacggtttacacagcaagtttgccgaaaccggcatgctggagacagtaggagtttccttgttagccatactgattctgctgttctccatcttcctgcaagtgcttctgcacgaaggcgggcatcttgtctgcggactggcaaccggctaccgcttcgtctccttacgcatcttcaaccttaccttcatacggaaagacgggaaattatgcatcaagcgtttcagccttaccggaacgggaggccaatgcctgcttaccccacccgaaaggactcttgaagatatcccgaccaccttgtacaacctgggtggagtgcttgccaacctgctgaccgccatccttgccttcctccccctgctgaccgtagacgggctgccttacctgctgaaattcttccttctgatgctctctctaattggcattctccttgcagggatgaacggcatccccatgaagatgggcggcatcggcaatgatgccgacaacatgcgcctgcttctcaaggacagcaagagcaagcaggcactggtcacccagctgcgcatcaacgcactggcgcaagagggcatgcgtcctaaggacatgcctgccgaatggttcagccaaacggaagacatcaactacaaagatgccctgcaggtcaccatagccttgatgagcgcctcacgcctgctcgactgcgaagaatgggaagccgcctacaatgcattcgagaaaataatgagtcaccggcacgaagtcatcggacttttgataaaggaaaacgcttgcgagctgctcttcaccgcactggtgacaaagaggaccgcacgggcagaagaattatataccgatgagctggatacctacatccggcaatacaaggatgtgacctcttccaaacagcggttgctctgcgccctggcgctctaccgggacaaggacacagcaaaggcaaaggagatttacgaagccacctgccaacggaaaaacaaatacctgatgcagggagaagtacattcggacatagccttgatgaaatcaatccttaccgccaagaacgccttgtaagatggaacgatattttttttactcgttatatctgctgcttggctgctcactatacggttgtagcggaaaacaagcgccaaagcagatacaaaacccggatacggaagccaccatcccgtacgccgacaccgtagcggcatccgtccctccggctccagccaaaagcctgacagcccgctacctggactccctcggtttcgtcaacatcgccgaagcggacagcagcatcgccatcgacttgatgtacacccgtgccgacaatttcaccggaaccctattgtacgaagacctgaaagaagcctacctgcaccccgatgccatgaaaagcctgaagcaggcacaacgcctgctgaaagagcggcgccccggctacagcctcatcgtctacgacgcagcacgccccttgtccgtacagcagaagatgtgggacgtagtgaaaggaacctccaaatacatctatgtctccaacccctcgcgcggcggtggcctgcacaactacggactggcagtggacatcagcatactcgacgataaaggaacccctctgcccatgggcaccccgatagaccatctgggcaaggaagcccacatcacggaagaagccacgctcgtggcacaaggcaagctgacggaacaagaacgtgaaaaccgcctgctgctccggcaggtaatgaaagaagccggattccgcccgctatccagcgaatggtggcacttcaatcgcgtcggcaggcagacggcgaaggagcgataccgggtcatcccttaactctcacccccagcttgtccgaaaacttaattttgctatcgctttgacgcagatgacacggattttaatcttcttaatctgcgtaatcagcgtcatctgtgtctgaaaaataatcagacagaaagctacgaattcatgccttactttgccctttttgagataactttgcatcagaataaataagccaagccatgcctttatcccaagacaccctccgtttcattcgcgagcatcgtcgcgacgacgtgcgcagccttgctttgcaggcacgccgctacccttcggtagacatacccgctgccatcacacaaatttccggctggcaggttgccaaagagaaaatacccgcatgggcgaagaacgacgacatcctctaccccgcccacctctcattggagcaatgctcctcccaagcaacggcacagtataaagcggagatcatagctaacctgctatgcacaaaacaagagcatcccgcgaaggacagcgcccctgcaccagccgccacttttaccgacctcaccggaggtttcggcatcgactgctccttcctctcctgctgcttcgggcacgccacttacgtagagcgccaggaagccctctgccagatagccgcacacaactttcctgccctcggcctaaatcacatctccgtctgccacgcagacagcgtccgccatctgcaagagatggaacccgtagactgcatattcatagaccctgcccgccgcgacggacacggcggaaagaccatagccatcggcgactgcgaacccgatgtagccaccctggaagacctgctgctccggaaggcacggcacgtactgataaaactctcccccatgctcgacctcacccttgccatgaacgatttgaaacatgtccgccaggcacacatcgtctccgtaggcaacgaatgcaaggagctgctgctcttgctgggacaaggcggaagcctgccaacagacgacgtccccatccattgcgtcaacttcacctccgccccggctccccaaacccttgtcttcacccgcgggcaagagaaagagtgtgcatgcccctacactcctcaactgaaatcgtacctctacgaaccgaatgcctccgtgctgaaagccggagcgttccgcagcctttccttattatataaggttaaaaagctgcatcccaacagccacctctacacttcggacagcctccttcccgacttccccggccgcaagttccgaatctcctcctcctgcggcttcagcaagaaagaaatgaaagagatgttggctgccgagaaaaaggcgaacctcaccgtacgcaactttcccgccaccgttgccgaactgcgcaaacggctgaaactggccgaagggggagactcttatctctttgccactaccctggcagacgaaaagaaggtacttatccgctgccagactaccggataagacaccaaaccctatatctttccttgcacaagatgtacatctcatactgttcgagatgtacatctcatgcagtctgagatgtgcatctcgtgcatccttagcattagtctgccagacgacgacaaaaagagatagcgccgaaagagtactacctccaagagcttatgtaacttcattgtaaccgaatcgttacctgttcttcaactctctgcaaaatccgcgtaacggcaacctcctacttttgcggcagattattaacagataataacaattatgaaacagatcttgagagcattcttattcctgctcttattcaccgccaccggcaatacagccatggccgacgaaaaagcaaatgtcacgaaacaaggaactgtacgcgggcgtatcattgacgccactaaacagactctcccgggcgcttctatctacatcgagaaactacacactggcgtgacgagcgacgtcaacggcttctacactttctctaaccttgacccgggaacctatacagtaaaggtgagctacgtgggctactcgcccgtagaactgaaaatcaccatccccgcaggccgcacactggagaaagacgtcgtgctaaacgaaggtgtggagttgcaggaagtggtggtaggcggcgccttccagggacagcgccgtgccatcaactcacagaaaaacaacatggggattacgaatgtagtctctgccgaccaggtaggcaagttccccgactccaacatcggtgacgcccttaaacgcatctccggcatcaacgtgcagtacgaccaaggcgaggcgcgcttcgggcaagtacggggcacgagtgccgacctcagctccgtcaccatcaacggcaaccgcgttccctctgccgaaggcgatacgcgcaacgtacagctcgacctcattccggcagatatgattcagaccatcgaagtaaacaaggtggtcactgcggacatggacggcgacgccatcggcggcagcatcaacctcgtcaccaagaactccccctacaagcgcaccattgccgccactgccggaaccggctacaactgggtgagcgaaaaggcgcaactgaaccttggcttcacctacggcgaccgcttcttcaacgacaaactcggcttgattgtatcggcctcctatcagaactcaccttccggctcctacgacaccgaattcgtgtgggagcaggacgatgacggcaagacgtacgtcaacgactaccaaatccgccaatactacgtcacccgcgaacgccagagctactctgccgcactggactgggacatcgatgccaaccacaaactgaccttcaaaggcatcttcaacaaccgcaacgactgggagaatcgctaccgcaccacgctgaaagaccttgatgccgacggcaacgccaccgtacgcatacagaccaaagccggtacgccggacaaccgcaacgcccgcctggaacgccagcgcaccatggactttgccctcggcggcgaacacctcttcggctcactctccatggactggcacgccagctatgccaaagccagcgaagaacgtcccaacgaacgctacatcgacttccaactgaagaaacagaagttcgacatggacctgagcgacgaacgcgaaccgtttgccagccccaaagcaggctctaccatgacgctgaacgatgaattcagcctgaaagagttgacggaacagcaggaagacatcaaggagcaggacctgaagttctccgccaacttcaagcttcccttcaagaacggcaacaagctgaagttcggcgcaaaggtggtgcgcaagaccaaggataaagaagtggacttctacgaatactctcctctgaacgaggacgccttcatgacgaacagcctggcaaatacagtggaccaaaccaacaagaacttcatgcccgacaacaaataccaggcaggcatctacgctagcaaggaatacaccggctctttagacttgaacaacgcttccctctttgagaaagagcaggtgcaggaagaacttgccggtaacttcgatgcccgcgaaaccgtgacttccggctacctccgcttcgaccaaaaactgacaaaagacgtggaactgatgaccggactccgcatagagaacaccaaccttgcctatacgggacgcacctacgatgccgacgaagacctcaccagtaagaccgaccgtcagcgcaacagctacatcaacttcctgccgtcgctgctcgccaagtggaatgtaaacgatgacttcaaagtgcgcggttcgtttacccaaaccttgtcacgccccaaatactcggccctcgtgcccagtgtgaatatcaagcgttccgacaacgaaatcaccatcggaaacccggagctgaaacctaccgtctcctacaacttcgacttgagtgccgactattacttccgcagcatcggtctgataagcgccggcatcttctacaagaagatagacgacttcatcgtagaccaggtgagcaccaactacgaataccagggtaacacctacacccgcttcacccaacccaagaatgcgggcaacgccaacctggtaggggtagagttatcctaccagcgcgacttcagcttcattgctcccgctctgaaatgtgtaggtttctacggaacgtacacctacacccactcccgtgtggaagacttcaacttcgaaggccgcgagaatgagaaagacttgagcatgccaggttctccggagcataccgcaaacgcttccctatactttgagaaaggcggcctgaacctgcgtctgagctataacttcgcttccgacttcatcgacgaaatgggagaaagcaccttctacgaccgctactacgacaaagtgaactatatggacgtaaacgcgagctataccttcggaaagaaattcaagactaccttctacgccgaagccaacaacctgctgaaccagccactacgctactaccagggcacgaaagaccgtaccatgcaggcagaatactacggcgtgaaagtgaatgcaggagtgaagattaatttttaatgatgactgattatgaagaaactattccttttattattggttgccctactcggcaacgcggctattgcccaaattaccgattactccatcttcgacaagaagttcaacttctacgtagccaacgacctcggccgcaacggctactacgaccagaaacccattgccgaactgatgggacagatggcagagaacggcgcagaccccgaattcgtacttgccaccggcgatgtacaccattttgaaggtgtacgcagtgtgaacgaccctctttggatgaccaactacgaacttatctacagccatccggagctgatgatagactggttccccctgctgggcaaccacgaataccgcggcaatacgcaagctgtgctcgactacagtaacgtcagccgccgctggacaatgcctgcccgttattataccaagacattcgaggataaaggcgctactatccgcatcctttgggtagacaccgccccgatgattgacaaataccgcaatgaaagcgatacctatcccgatgcctgcaagcaggactaccggaagcaacttgcctgggtggactccgtactgagcgccgccaaggaagactgggttatcgttgccggacaccatcccatctatgccgaaaccccgaaggacgagagcgaacgcgcggatatgcaggcacacctcgatcccattctgcgcaagcacaaggtggatatgtacatctgcgggcacatccacaacttccagcatgtacgcgtggcaggcagcgacatcgactatatcaccaattccgccggttcgctcgcccgcaaggtgaagcccatcgaaggaaccgtattctgcagccccgaaccgggtttctccattgtatcggccagcaaaaagacactggaactgcgcatgattgacaagaaaggaaatgtactgcacacggtgacgcgcagcaaataacctactaaactcttcgcgacagaaaatccggaaatgttgaagaaaatacagtcacactgaagaatacatcgaaaagttttcaaaacaaaacagaaaaggatcttgcaggagataatagatgaactgtaatattatcaccgaatacgaaaaagcttgtacttgcgggataaagggaaatcatgatttccctttatcccgcaagtcatccttgggtatggtcgtctcactgccgtcacgcgtagctatgtagtgaggagacatgatttcgatgcctgcttcgttgaaaacatcctggatattctgatgcaaatcagagtaaatctggctaaggctgttggcatccctgatataggcattcacttgataaaccggataataatcctgaagggaagtttccaatataaacgggcggggatcatctatcactccaggggtattcaatgcagcctctatcaacagctggtgtgtcttccgccacggaacatcgtagccaatactgacctccgaatggataatcaatccatactcacgggcagactggctgtaattgaccgtatgggaagacatgatgaaagagttcggaatggtcaccacctcattcttcggggtacggatgcgggtgacaagcggcgttttctcaatgatgttgcccgtagtgtcgttcagcttgatgcggtcacccagcttgaaaggtcgcatgtaggttatgaccagccctgcaatgatattgccgataactgtactggagccgagcgaaacaatcaagccgacaaacacagagattccctggaagactcccgacttggaacccggcaaataagggtaaatcatggcaatcataaacgcataaagcaagaagcgcacaatgtgataggtaggaatggcccaatccggatagaagccgtttatcttcagccgttcagcctgcacctcattggcaagatagcgcaccagtctgactaaatacttcaccgcatagcatatcacaaagatagtgaacagattgggtatatagtcggttattccattcagaatgacctttataggattccagatgtaggagaataatgtataagccaaactcttggtctgagggaaaatggagaataacagtggaactgtcagcaacaactgcaacagcatgaccacataacgcaccagattggcagcaaacaccagcaggttgacctgcttctgcgtatccaacaattcataatcctgaatggagatcggtttcagtttggtatccttcagtttctggatgcgtagtttgagctttctgaacagccagttagtaaacttgaataggaagaattgtcctacaagcaccaggataaaatacaagatgcgtttacccaactgccacaagctatgctccttctgcatggcttttagtttgtccaccacgacatgcctcttgctggcggccagctggtcgcgagtacagttttcccacaaagcatcctgatcggtaaaggaaatgatgaccttttcgccatacatcaagtccgtaacaatatccgtactctccaaataaacagagtccggacgcagactgaaacgcgtgcccaatgcttcgatgacgctacttacatccttggcccgctgctgaggcgtatgccctccacgcttggcatatagatagaacaaggtgtccttctctaccaccaccggaatacccggcgtcaccgtccgcaacgaatcaatgcgttgtttctgcaatgccagtttcaccgaatcggccgcatagcccgccaacttcatctgctccatttccatccgcaaattcgcctcgttcagccgggctgtttccaactcccgccggacaagcgacaactgaatcgaatcggagtcggtccttgccactgtgacactccccacactatcctcccctaaaacactgagcactttatctaccagctgagctgacactccgcccgccagcatcaacagccaactaagacagaaagtacggataaccttcatatataaacttcttgatttgattctttaattatgcaagcatacccaataaatgctccaaacatacagaatgtttttaacttcctatcctaatcaacataactttttcatgcaaacatgaaaattctatatccagtttgcattatctttgtactcaaaattgacatacttatggatatattgtttcttgtcggaggactgctcctcattcttttgggtgccaatggcttgacagatggtgccgcatccgttgccaaacgtttccatataccgtccatcgtcatcgggctcaccattgttgccttcggtacttccgcaccggaactcaccgtcagcatctcctctgctctcaaaggcagtgtagacattgccattggtaatgtggtgggaagcaatacgttcaataccctgatgattgtgggttgtacagccctttttgccccgatagccatcacccgcaatacactgaaacgcgaaatacccctttgcatcctttcatccttcgtcctgctgatttgtgccaacgatgtctttctggacggcggtggggagaacatactcagcatcaccgacggcctattgctgctatgcttctttgccattttcctgagttatacttttgccatcgcaaaaagggatggaagtatgaaggaaccggaaaaagagcacttgcaggaagaagacgaaatcagactgttacccgcgtggaagtctaccctatacattctcggcggacttaccggcctcatcatcggaggtaatttctttgtagacggcgccagcggcatagcccgcggattgggtgtcagcgaatccatcatcggccttacgctcgtagcaggcggcacatcactgcccgaacttgccacctccatcgtagccgccttgaagaaaaaccccgaaatagccatcggaaacgtcatcggaagcaatctcttcaatatattctttgtgctgggttgttcggcctccatcactccactgcgtctgacgggcatcaccaatttcgatttgtgggtacttgttggggccagcctcctgctttggctgttcggtgtctttttcgggaaacgcatcatcacccggctggaagggagcattctgattctctgctacattgcctacacagcggtactgatatacaacctctaacagcaaatttacagacactctacgcggtattttaaagattatcacgtatctttaaataaggcaagctgcatctcggcataaaaaataagcaagcttattttgttctactctcagtttgcattacctttgccacctcaatattgaacaactatggcaattacaatcaagaaagtaaccacaagacgggaattgaaacgctttatccgtttcaactacctgctatacaaaaacaacccttattccgtccccgaccttttcgatgacatgctcaacaccttcaacaagaagaaaaacgctgcatttgaattttgtgaagccgactatttcctggcttatcgggaaggtaaaatcgtaggacgtgtagctgccatcatcaaccacaaggcaaaccaaacctggaacaaaaaggaagtccgcttcggctggatagacttcatcgacgatgcggaagtctccgatgccctgattcgcaccgtggaagaatggggaaaagaacggggaatgacacatatacaaggcccgctgggattcacagacttcgatgccgaaggtatgcttatcgaaggattcgaccagctcagcaccatggccaccatttataactatccctactatccgcaacatatggagcgcatgggatttgagaaggatgccgattgggtggagtacaaaatctacattccggatgccatacccgacaagcacaagcgcatctccgacctcatccagcgcaagtataacctcaagataaagaaatacacatcggccaagaagattgcccaagactacggtcaggccatcttcgaactgatgaacgaagcctatcagcccctctacggttattctgcactgagccaacggcagattgaccaatacgtcaagatgtacctgcccatcctcgaccttcgcatggtgacactgattaccgatgccgatgaccagctgcttgccgtaggcatttctatgccatccctcgccgaagcgttgcaaaaagcccacgggcgcctgcttcctatgggttggtatcacctggccaagaccatcttcttgaagaaatatcccaaaatgctcgacttgctgctggttgccgtaaaaccggaatatcagaacaagggcgtcaatgcactgctgttctccgaccttatccccgtctatcagcaacttggtttcgagtatgccgaaagtaatccggagctggaattgaacggcaaagtacaagcgcaatgggagtacttcaagacggaacagcacaaacggagaagatgctttgtgaagggaataaaataaattctaaatccagaatataagcttgtcagaagtccataaaagacattatttttttgcgaacccccgaatttctcattacctttgtcgcaatgcgcaatatgaaggaataacgtacttatggaagataacaacaatatgaccctgccgctggaagaagcagacaacaatatcacagagagccccgtttccagcgtagaatataccgacgacaacatccgccacctggacgacatggagcatatccgtgtccgttccggtatgtacataggccgtctgggcgacggctcacagaacgacgacggtatctatgtgttgctgaaagaagtgatggacaacagcatcgacgagttcaagatgggtgccggaaagcgtatagaagtgactatagaagacggcctgcgcgtcagcgtgcgcgactatggacgaggcatcccgcaaggcaaactggtagaggcagtcagcaaactgaataccgggggtaaatatgactcgaaggctttcaagaaaagtgtcggactgaatggcgtgggcatcaaggcggtcaatgcgctgagtagccgtttcgaggtacgcagctaccgcgacgacaaagtacgtaccgtcatcttcgagaaaggaacgctgttgagtgatgtgaccgaagactcgacagaagaaaacggaacttatatcttctttgaaccggacaacacgctcttctacaactattccttccagaaccagttcgtagaaaccctgctgcgcaactacacctacctgaatacgggcctcaccttcatttacaacggacagcgcatcgtctcccgccacgggctggaggacttgctgaaagacaacatgaccagcgaaggcctttacgacatcatccacttgaaaggagaggacatcgagattgccttcacacataccaatcaatacggtgaagagtactactcctttgtcaacgggcagcacaccacccaaggcggtacacaccagactgccttaaaggaacacattgcccgtaccatcaaggaattctacaacaagaaccaggagtatgccgacatacgcaacggactggtagccgccatcgccatcgacgtggaagaacccatgttcgaaagccagaccaaaacgaaactgggcagcaacaacatgtggcctgccgcgccgcaggagcacaagcccgccggccccacagtaaacaaatacgtaggagacttcatcaagacggaagtggacaattacctccacaagaacccgcttgtggccgaagtgatgctgcaaaagatacaggactccgagaaagagcgcaaagccattgccggcgtcaacaagctggtacgcgagcgcgccaagaaagccaacctgcacaaccgcaagctgcgcgactgccgttaccacttgagtgacggtaaaggcaaggatcaggaaaccgattcctgtatcttcattaccgagggagactctgccagcggctccatcaccaagagccgtgacgtgaatacccaagcagtattcagcctgcgtggtaaaccgctaaatacctacggactcaccaagaaagtagtttatgaaaacgaagaattcaacctgctccaagcagccttgaatatagaagacggcatagaaacactgcgctacaacaaagtcatcgtagccaccgatgccgatgtggacggcatgcatatccgcctgctgattatcaccttcttcctgcagttcttccccgacctgataaagaagggacatgtatacatcctgcaaactccgctcttccgcgtgcgcaacaagaagaagacaagctattgctacactgaggaggaacgtgtgaaagccattgaagaactgggtcccaaccccgaaatcacccgattcaaaggtctgggagaaatctcgccagacgagttcaagcatttcatcggcaaggacatgcgtctggagcaagtgtcgctgcgcaagacagacctcgtaaaggaactgctggaattctacatgggtaagaataccatggaacggcaaaactttattatcaacaacttggttatagaagaagacttggcatcatgagaagagctatctttccgggaacattcgacccatttactatcggacactcctcggtagtgagccgtgcactaactttcatcgacgaaatcgttataggaatcggcatcaatgaaaacaagaacacgtatttccccctggaaaagcgcgaacagatgatacgggactactaccggaacgagccgcgcatcattgtgcagtcatacgattgcctgaccatcgactttgcccggcaggtagatgtcagcctaattatacgcggcatacgcaccgtcaaggatttcgaatatgaggaaaccattgccgacatcaaccgcaaactgaccggcatagaaaccatcctgctcttcaccgagccggaacttacctgcgtcagctccaccactgtgcgcgaactgctgcaatacggcaaggacatcagcatgttcataccggaaggaatggagattagggattaaggattaggaattaaaatggagatgatgaagaaactatttactattataatatgtatatgcgcgatgacggcgcaagcgcaaaagccgaataatgaagccctgcgcaaactacagatggcagagtttgccatcaccaacctctatgtggacaaggtggatgaagacaagctggtggaagaagccatcatcaagatgctggcacaactcgacccgcactccacctacaacaatgccgaagaagtaaagaaaatgaacgagccgttacaaggcaatttcgagggcatcggtgtacaatttcagatgatagaagataccctgcttgtgatacaacccgtcagcaacggtccttccgagaaagtgggtatccttgccggtgaccgtatcgtagccgtcaacgacagtgccattgccggagtaaaaatgagcacggaagatattatgagccgcctgcgcggaccgaaagactcggaagtgaaactgaccatcgtacgccgtggcgtggaagaccagctgtacttcaacgtaaaacgtgacaaaattcccatcctcagtctggatgcctcttacatgatacaacccaaaattggctatatacgcatcaaccgctttggagcaaccactgctgaagaatttgcagaagccctgaaaagcctgcagaaaaaggggatgaaagacctaatcctcgacctgcaaggaaacggaggagggtatctgaatgccgccatcgaccttgccaacgagtttctcaagcaaaaagaactcattgtctacaccgaaggaagggcttcgcgccgcagtgatttctttgccaaaggtacgggcaacttcaagaacggacgcctcatcgtattggtggacgagtactccgcttctgccagcgaaatcgtgaccggggccattcaggactgggacagaggtgtgatagtagggcgccgcacattcggtaagggactggtacagcgtcctatcgacctgccggacggttccatgattcgtctgaccatagcccgttactataccccttcggggcgttgcatccagaagccttacgacagtaccgccaacctcgatggtcgtctgagtggagaaaacagtcaggataaatataatcaggaactgatagaccgcttcaatcatggagaaatgattcatgcggacagtatccattttgccgactccctgaaagtgcagaccaaacgtatggggcgtaccgtttacggaggtggaggtatcatgcccgactttttcgtccccatcgacactacccagtacacagactatcaccgcaatctcgtagccaaaggcgtggttatcaaagccactaccggctacatcgagaaacaccggaaggagctgcagaacaaatacaagaaatttgaagccttcaacgagaaattcgagatagacgataacttccttgccgaaatacgtgcgcttgccgacaaggagaaaatcaagtttgacgagaaacagtaccaccaatccctaccgctcatcaagacacaactcaaagccttgattgcccgtgacctatgggacatgaacgaatacttccaggtgatgaacaacacgaaccagagcgtacagcaagctctaaaagtgttgaatgacgacatttacagtgccattatccaatagccggcttgaaacagacattaggcgcggattatgcggaatacgtaaactaaatccgcgtaatccgcgcctaaaattattctccaaacagccatttattcagccacttgttgacatagatattgaccacagcacatcctgcaccgattgcagcccccgccaatacatccgacggataatgcactccctcgttcatacgggaaactcccacggaacaagcccacaaggcagacggagctatcacataccatttaggatacttcacactgagcgaggtggcaagggcaaaagccgttgccgtatgcccggaaggaaaagacgggctgccttcatgactatacgcatgtactctgtcgggatatttatcataaggacgttcacgacccaccagatacttcattccataagtcacaacaaaagcccccgccacacttgtacctacgtagaccgcatctttcagcaaacccttatcatgttttatccaagcggcaacggccatcgccaccggaacaccgacagcaatatagggctccgaacgtgaaattatcttattatagttacggacaaacttgccatcccaactgttaacccggtgcaaagtgttgatatcccaattctgtgccgaaagaccggatacaacaaggcagataaaatatacaaaaaaaacagcctttttcataagtcctttatactagtttgacgcaaagataggacaaatagatagagttttcacaaaaaaattctatctttgttgccacatttataataatttgctaatcatttcatgagactggaaacttactgcaaccgacagattgattgtgtggtatgtcctcaaaaatcagaagaagtattggtttaccgccactatcccaagggacaacatttctctgctgaaaagtgcacacagaactgcatgatatttatgctgaaaggcgaattacttgtaaacagtaacgaatatccgggcaccactctccaaagtcgccagctcatcctgcaagccatcggctccaaagtagagctcttggctctaaccgaagtggaatatattgtctattggttcaccgagctccccctaatttgcgaagagcgttacaaagagatactgaaacgctcggaagcccctctgatttacaccccgcttacagcaattcccatgctcgaaggacttctgaaaagccttgcctgctacctcaacgagcagccttatgcgtgcagcaaatacattgaaatgaaatgccaggaactgacatacatattaacatgctactatccactacaccaaatcagtacatttttctaccccatcagtacttatacggaaagcttccagtatttcgtcatgcagaactacgacaaagtgaagaatgtggaggagtttgcccacctcggcggatataccaccaccacattccgccgtatgtttaaaaacatgtatggggtcccggtatatgagtggattctggacaagaaacgcgaaggaattctgaacgacctgcaatataccaaacaacgcatttcagtcatcagcgcccgctatggctttgattccctatcccactttgcccacttctgcaaagactctttcggagacacaccccgcgccctgagaaaacgtttggcaaacggagaaaagatttccattatctgcaaagagcaaggcaaagaccaggaggacgagtaaaccttttacttgtccgcaaacttcgcatcctgccggattacggaattatttctttaatcgcttgctttatcgctggatttctcctatttttgcgaaacatttacagaagtatcctgatagaacaaattttcaaactattaaataacttaaattcaatcatttatgtggttaagtaattcatctgtaggaaggaaagtggtgatgagcgttaccggtatcgcccttgtcctgtttctgacatttcacatggcgatgaacctggttgcattagtctcggctaatggctacaacatggtttgtgagttcttgggagcaaactggtacgcattggtggctacggtaggtctggctgccttattcatcatccacatcatctacgctttctggttgactatgcagaaccgtaaggcacgtggtagcgaacgctatgccgttacggaaaagcccaagactgtggaatgggcttctcaaaacatgctcgtattgggtatcatcgtaatcgtaggtttgggcctgcacctcgtaaacttttgggctaaaatgcagcttcccgagttgatgcacaacatgggcatgcatgccgacaccctcacgctggcatatgcagccaacggtgtctatcacattcagaacaccttcagcaatccggtattcgtagtgctttaccttgtttggctgggcgcattgtggttccacctcactcacggtttctggagctccatgcagtctttgggctggaacaacaaagtatggattaaccgttggaaatgtatctccaacatctattctactatcgttgtcctctgcttcgctctggtagttgtcgtattctttgcaaaatcattgtgcggcgcttgctaaattcaaattgtaaatgactaaattgtaaattgcattatgactaagatagattctaaaataccggaaggaccggtggctgagaaatggaccaattataaggctcaccaaaaattagtaaaccctgccaacaaacgtcgtctggacatcatcgtagtaggaaccggacttgccggtgccagtgctgccgcctctctgggcgaaatgggtttcagagtattcaacttctgtatccaggactctccgcgccgtgcacactccatcgctgcacaaggtggtatcaatgctgctaagaattaccaaaacgacggtgactctgtgtaccgtctgttctacgatacagtaaaaggtggcgactaccgtgcccgcgaagccaacgtttaccgtctggctgaagtatccaacaatattatcgaccaatgcgttgcacaaggtgttcctttcgcccgcgaatacggcggtacactggacaaccgttctttcggtggtgcccaagtatcacgtactttctacgctaaaggtcagaccggacagcagctgttgctgggtgcatactctgcattgagccgccaggtgaacgtaggtaccgtaaaactgtacacccgctacgaaatggaagatgttgtcctcattgacggacgtgcccgcggtatcattgcaaagaacctcgttaccggtaaattggaacgttttgccgcccacgctgtggtaatcgctaccggtggttacggcaatacctacttcctttctaccaatgcaatggcatgtaactgctctgctgcaatggcttgctaccgtaaaggtgcctggtttgccaaccctgcttacgtacagattcaccccacttgtattccggttcacggtgacaagcagtccaaactgactttgatgtccgaatctctgcgtaacgatgggcgtatctgggttccgaagaagctggaagatgccaagaaactgcaggaaggtacactgcaaggaaaagatattcccgaggaagaccgcgactactacctggaacgccgttatccggcattcggtaacctcgttccgcgtgacgttgccagccgcgctgccaaagaacgctgcgacaagggcttcggcgtgaacaacaccggtcttgccgtattccttgacttctccgaagctatcaaccgcctgggtaaagatgtcgttgcacaacgttacggcaacctcttcgatatgtatgaagaaatcactgatgtcagcccatacgaaaacccgatgatgatttatccggctatccactataccatgggtggtatctgggttgactacgaactgatgacctccatcaagggactgttcgccatcggtgaatgtaacttctccgaccacggtgcaaaccgcctcggtgcttccgccctgatgcaaggtctggccgatggttacttcgtattgccttacactatccagaactatctggccgaccagattacagttccccgtttctctaccgacctgcccgaatttgcagctgcagaaaaggccgttcaggagaagattgactggatgatgaacatcaagggtaagaagtctgtagactctatccacaaggaactgggccacattatgtgggaatatgtaggtatgggacgtacggccgaaggcttgaaggaaggtctgaagaagctgaaagaagtccgcaaggagttcgagaaagaactgttcatcccgggcgacaaggaaggtatgaatgtagaactcgacaaggctatccgtctgtacgacttcatcactatgggcgagctggttgcttacgatgcactgaaccgtaacgaaagctgcggtggtcacttccgtgaagaatatcagactgaagaaggcgaagccaaacgtgacgatgaaaactacttctacgtggcttgctgggaatatcagggttctgacgaaaaggaaccggtattgctgaaagagccgctggtttacgaagcaatcaaggtacagactcgtaactacaagagctaatcgggaagttgaacatttaaagaattaaagaaaatggataaaaatatatcatttacgctcaaggtatggcgccagaagggtccgaaagcaaaaggcgcttttgaaacataccaaatgaaagatatcccgggcgatacctcattcctcgaaatgctggatatcctgaacgaacagctgatttctgaaggtaaagaaccggttgtattcgaccacgactgccgcgaaggtatctgcggtatgtgttcgctctacatcaacggacacccccacggtcctgcaaccggcgctacgacttgccagatttatatgcgtcgtttcaacgacggcgataccatcactgttgaaccgtggcgctctgccggtttcccggttatcaaggacttgatggtcgaccgtacggcctacgacaagattatgcaggcaggcggctacgtcagcgtacgtaccggtgctccccaggatgccaacgctatcctgattccgaagcccatcgctgacgaggctatggatgctgccagctgtatcggttgtggtgcttgtgtggctgcttgtaagaacggttctgctatgctgttcgtttctgccaaagtgagccagctgaacctgttgccccaaggcaaaccggaagcattgcgccgtgccaaggctatgttgagcaagatggacgaactcggtttcggtaactgtaccaatacccgtgcgtgcgaagcagaatgcccgaagaatgtttccatcagcaacattgctcgtttgaaccgcgactttatcattgcgaaactgaaagactaatccggtctttctgcaaataatataggatgcgcttcggataaaccttttgagcaagctcagatttatcactcagctttcactatatttgattaatatcacaagagactcctctgccgggaaaccgccggaggagtttttttatgacatgccgcttacttcagataaattgccggcacgcaagctacggggagaagccccgaaattctttttgcagaaattggaaaaatgaggcagcgattcaaagccatatttatagcaaatctctgatatggaagcatccgtataacgaagttcataaaccacactttccttcctccgttccatcatccactcgtacaccggttgatgaaaaacagaattgaatatacgccggaaagtagccactgtatatcctcccagctgggcaaattcctctactgtcttgactttggcatgattctgcaagacaaagtaatggaaggaattagtatactgggcaagaggatgtatcagcatggaaagctcatagtcggagtaataatttccaagaatgaaagcaagttctttccgtttgaaacaaagcatttcccggcaaattttctcctcggacaaataggccttggaactttccagaaagagctgcaattcgggagtaatggtcaaaggacagaatatcaatggaggggtaatctctttcatgatatggttataccggtcctcacagaagaattcaggcttactgaaccggtaacaaacacattccacatccgtcatggcaagtatttcgtactttgaaccaatggcttgaaggatgaactcacctgcatgcaacacagttcccgcatactccttactgttaacaagcacttctccttgcagcagaaaaattacaatattttcctcacacttccgtgccggcagatggaatcctctggggtgagaagcatatattattgcattgtccacagccttgggacattgagcgcattgttttttacctccgcaagcagaagagttgggcatcggcaagtagatttgtttgtttgttgcagtgacaaaaatagataaataatactcataaaagaaacattccccgaaaactttcataaagaagtctcggggaatgaataaaatagaagcaattcagttttgcggacagtacccgtttctatttacacaaaattatggatactgccttttatttttccacattcgtatcatcagccgtactccacggaccaacttcaggtacaaaggttacttttgccgccttattggccagcgtcagcgtataacgtatctttttgccttcaccccaggcttgtgtaccatccaagtcaatggcggaagttacagtatcaagaagaacgtctttctcatagatgtcatagacaacattgattttggcgttcgtatccaacgtctggggcatcaacatccaggctgtattcacttccacacccgttgtattcacttccaatgcaccaccgtcaatcgtatgtgcataagtagccgttccttcctgtgacttccatgttgaatcatcaaaaccataagttcccttattgtgcacaccggatattgtaagtgttttcagtttataagtcaaagcgtcggctgccttgacagtgaaatttatttgcgtcagtatatggccgaatttcaaagataccccactggcatttgatgccttggttgcatccgtcgctttcgcggctaccaagtccgtttgggtaactacatccgctaccgtataagtaatggaaggatatatagcaccagcagccggttgattgtacgtcaaggccccggtacccggatccccgtaagcaaagaactgcaagttatccgtcattggccaataatatgttcccccagtcaaactccagtcgggagcactataagttaccttaacatctgccatgaattccttcattgcatcaaaagtcgcaacagaggccattgttgttgctcccgtattataagcatacacagtgaaccctaccttctgcaattccggcaaatcagtcactgcggctctcgtagtgttacccactactgttcccaatttaatctccgccttttgtccggcattctctatctcctcactttccgagcaactcattactgctgctgcagccaaagccaaaaataaaaccttcttcataattgtctgttattaaagttaatatatttatttgtctgtttgctatcaattcaccggtagctccacatccgtctcatcatcccaatcatccacatcgccaccaatccctccatctccttcatcggttcccggttccaaatcatccaccacaaccttgtcctccggtacgggaacctcgatatggatttccgacccaggaacgcccacatcaggttcttcttcgcctcctcccgagggaggagctgtttcaatcacttccgtgatatccaccttcacctcttgaaccgttttatctcgtttcacaatcttcaatgtcagcaacataggactatccgcacgggtcttggcatctttcagtaatacaaaactggagaaatacccccataaaagcccgttttcacgctttgtattcacacatataggtacctcgctcaaatggcaagcacggttgcctataaagtaacttccgttcaagccgtccacatggcagatgatgctcaatattctatcccatccttccacctttatatcaaaggaataatggtccactaccgcttccggcttccagtccaacggaagcgccacatcactctgccttatttccacctcgtccaaagccaccacatacaaagggtcgggcgaccaaaccatatcttcgtgtatatccagccccgtacagtgtcctgtaaaagcctcaatcgtctcataactctcgtcgccccgtatctgtatactctccgtattgaagttataggccaccaccgcatacctccccggcggtaccttcacctcacccccttcggcaggcagataactttcaacctttctcctctgagtatctttcggatagaagataatccgcatggtctgcggcagcttatccgtcacccctttccaatccagtttaatctgtactccgctaacgggataatcatccagcatatcgcggaagtcacagcttcccagcattggcaacagtccgaagaacagccagagaatcatatgccgtgcatctttcataccactcatctccccgacgttagaagccacaccaaagaaacttttgcttttgtcggcccgataaagcgatactttccactcctgacccaaaccaagtcatttccataagaagtatatttccggtactccgtatccaagtatccaatacccacactgaattcaatcgccagatgccgagccagtggacgcacatatccataagttattccagcagcagcgtaatacttcccccggtatcccttctcctttttcaactgaaaatcataggtacctccttcggcatatgctcccaggaaatgtccgaacaatattccatgcgtatagcggtttcccaaccagtaacgtacctctgtccctcccgaaaggaactgataacagaaaccacatccgctgtcagaccaccaaggacatttgtactcaacattcaaagaccacctctttctcaatggcagctccacttctatgttcggagccaaggccaggtcgtaaagcaaattattttttaacgccagcaccgttttacaagtatggctatgagattccgccgacttattctgccctattacctgccccgacatcatgcaaaaaaggagtagccaaagaacatatataagaatgcgttttcccataatttcgcgttgtatacaaacaaaagtagaagataattaccgaataaaatccactttccatcactcttttcaaaggctgaaaggttctgtgaaacgattgaaacagatttgcaacttttgccttatccgggacgctgtgaatagattctttccatactctctcaaaaagtcaatccgtgtgcgaaaacagtaaaattcagtgaaagaaatacaaaagaagtagcagaatcattctgaaatttggaagataacaatggaaaccttacatttgtaatgtgatttttttcatagtattagatttaaggttaacaaaggttggagtacggcggtactcctttttttatacccatacgtttctccgaatgacaaaaaatagctatcttcgatggcttttataactgttaaagaagaaaacatcaccacttgagcccattatgaaaaaaccggtactcgcattgctttccataatcctacttaccgcaggatgttcccaacggcctgccaccaccaagatacccctgaccagcgcacaccgtggtgcggccaccattgctcccgaaaacacaatggcatccgtagattcgtgcatcaaatacggtgtaggcaatatagaatgcgatgtctgcatcagtaaggacagtgtcttctacgtactgcacgattccaccctcgaccgtaccaccaacggtaccggcgccatctcccaatggctgtccgccgacatcgacacactggatgccggctcttggtttgcgccccgatttgccggacaacgggtactacgccttaccgacctgctacgcaaggccaaagagcacggtttaagaatcaccatcgactaccgcaacggcggtctgcaccaattactgaatctgataaaggacgaaggcatgctggaaaactgcaacttcaccttcagcaaggagtatcatgccaaatgcttcagaaaaatggcacccgaggtaagaaccctgcaagcctacatcaaaagtgaaaaggacatagagcatgtcgtaaaggaactgcatcccgacatcgctgtcgtctggattgactcccttaccccgcaattcgtaaagaaatgccgcgagcacaacctgcaggtactggcacttgtcctggggctggacgacaagacggaagagaaccagaaggcggtcgacctgggggtagacatcatagcgacggaccatccggaaaagttcatcatgaaatacgggcaaccgtccatataaggcaagagacctgctgcgcttaggtcagcaaatgatagacaccgcccaccattgccttgaccactcctttcatctccagttcaaaaagcaaggcactcatccggttgacgggtatatccgcttccaccaccatcgcattgatatggaggtctccctgccgcataaggatgcgtacaacaagctcctcctcttccgtcagttccgggaagagattacgctgaataccttctgtccgggcaggctgctccgctacggaccagcccataatctgcacaaactcttccgcattctggataagggcagccttgttgtcgcgtatcaaccggttgcaaccgatggaagattcgtccgtaacacgtcccggaacagcaaaacagtcacgatgatatccctccgccaactctgcagtgataagggaacctccctttgcggcagactccaccacaatggtagcatcactcatacccgccacaatacggttgcggctgacgaaattatgcttgtccggattcgtcccggtaaggaattcggtcagcagtccgccttgtgccagcatgtcgatggctgttttccggtggacatacggatagatgcggtccagtccgtgagcaaggacagcaacggtagggagatgatttgccaaagcggcccgatgggcatggatatctatcccgtaggccagtccgcttactaccagcacatcgggacaaagaacggccaaatcgcgcaggaagtcgatacagaattgcttgccgtaatcggtggcacgacgtgtacctaccatatcgatgacatgcaggcggttgaaatcggtgtttcctttaaagaaaagtacaatcggcgcatcttcacattcacgcaagcgcgaagggtaagcctcatccttcaacgtcaggcaggaaagacgattcttctctacaaactccatctcctgctcggcacgcagaaaggcagcgggacaatcaagagccgtcactacccccggattcacaccgggcatgatttcgggaagctccttccgccgactgaatacttcggcagcactgcccataccctctattaaacgctttgccccgatatgtcctataccggggcaaagtgtgagagctatactgcaaatccgttcgtcactgttcattccaccaaaaattacacggacttacacgggttgagataaggggcaaaaaggcggtcgaacagttcgctgtcgctcaaccggccattgactacacacacggtctctaccacgcctttgaggcagaccttaccgtcggaaacacggaagatatcttgatagaagacgtacttgataccttccttcttcatataaagtttggaaacaaactcgtcaccactcctcaggggagtcttgaaagccatattgatacgtgccactaccgggtctaccccctgctcgtgcagtccggcaaagctgacgccggcactcaacagaaactcatggcgcgtatgctccagataatgctgataattggcattattgacgatgccttgcaggtcgcattcatagtcgcgcaccttcatgggaagttcatagatataattcatatttagtattggactatttactatttgatacttagccacgttgtttctccacatccaagcctttgaacttcttcagttcctctacgctgaccagcttgtagagtttgtcactgggacgtattttcaccgatttcatcgagaaatgctggcctttctttacagtctgcacgggtttcaaatcgacgcgtgcctcgtccaaagtgacgaattcggcacccgttgtgggacccgtaatcagcaacttgtcgcctacgctcacttcggctgcttctaccaggaactccgccacaccgatgtttgagaagtagcggatgcccttacccacatagattttacgttccgtagcggcagagccgtagttcttggtccattcgcccaagcgttgtcccaggtagtagccgtcccagaaaccacgattgaagaccgtcttcaaacgttcatcccaccgggcaatcttctcatcggtgaatgtatcgtccagataggaacggatggcttctttgtaacactccactaccgtgcgcacgtactcgggtccgcgggcacgtccttcaattttgaaaacacgaacacctgcatccagcatcttgttcatgaagtggatagtttttaagtctttgggggacatgatgtactggttgtccacctccaattccacatccgtctccttgtcgcgcaccgtgtagctgcggcggcatacctgcatgcaggcaccgcggttggcggagtggttcatttcatgcaatgagagataacactttccgctgactgccatgcaaagggcaccgtggcagaacatctctatacgtatctgctctccgctgggaccgcagatattctcctcacggatatgtcggtagatttctgccacctgctccagattcagctcacgcgccagcaccaccacatcggcaaactgcgcatagaagcgcagggcttccacattgctgatgttgagctgtgtgctgaggtgtacctcctgccctatctgacgggcatagctcatcactgccacatcggcggcaatgacagccgagatacctgccgcctttgccgcatctacaatggtacgcatcagcggaatgtcatggtcgtatatgatggtattgacggtaagatagcttttcataccatgttcatcgcacatccgggctatctcccgcaaatcgtcgatagtgaaggtattggccgaacgggcacgcatgttcaggttctcgataccgaaatagatggagtcggcatctgcttgtatggctgctgcgagagattcgcgcgagcctaccggtgccatgatttcgaagtcactgattgagtgtttcatcatttctttttgaattagagtatgcaaaggtaggcttttttctgtacttttgcggacaaatccgcttagattatgaagattaaagatatagacctgggcccacgccccgtattcctcgccccgatggaggacgtcaccgaccctgctttccgcctgatgtgcaagcacttcggagcagacatggtatataccgagttcgtttctgccgatgccttgatacgctccgtaggcaagacccagcagaaactgaatatcagtgatgaagagcggcccgtagccatacagatatacggacgggacaccgtcaccatggtagaagccgcccgcatcgtggagcaggcacacccggacacgctggacatcaacttcggctgccccgtgaagcgcgttgccggcaagggtgccggtgccggtatgctacagaacattccgctgatgctggaaatcactcgtgccgtggtagatgccgtgaagattcccgtcaccgtgaagacccgcctgggctgggatgccaacagtaaaatcatcgtagaccttgccgagcagttgcaggactgcggcattgccgccctcaccatccacggccgtacccgcgcccaaatgtataccggtgaggcggactggacacttatcggcgaggtgaaaaataacccacgcatgcacattcccatcatcggcaacggtgatatcaccactccccaacgggccaaagaatgcttcgacctctacggtgtggacgccatcatgataggccgtgccagcttcggccgcccgtggttctttaaggaagtgaagcattatttggagacgggcgaagaactccctccgctgagttccgaatggcggctgaacgtactccgccaggaagtggaagacagcgtcaacctgctggatgaacgacggggcatactgcacgtgcgccgccacctggcagcaagcccgctcttcaaagggattcccaatttccgcgacacccggatagccatgctgcggacagagacgaaggaggaactgtaccgcatcttcgaagagatagaaccgttgctgccataggagaaaaccgcatacgatttttaccatcgagtccgatacttgagcaatcatcctcacgccccttcttgaatagcttctgagaggggggggagtattcagacacagatgacacgctttgttgccatccgcataactcactgtctgtcagcaagaaattttgccaaccacttgccttgcccttggcaaacttttgccatgcctatggcaaagccttgccaatgggaaggcaaaaccttgctaacaaggaggcaagaaaaaaaacattgtttctttggcagaaagaaacaagtccctatattcgtcttcccaagaaagaatcccataaatatgtctttatgaaaaagaaaaaactactcaaacagctcatcgtaaacttccagcattcacttccggcagaagtttatccgcgtacattggtattgcccacagacagtggaaagataatcaccgtgcccgactagcggaacatcggctgcgcaaaccatcgcttgaacatccacgtggccaggatataaatgccgaaagccgatacgaaacccacgatagagtctatcaggtaatgtgcctggatatagaccgtagccccacacaacagcagatagaaaggaaacaagcaggcaaacagacgcttgctgccacgccatgccataatcatcagtaccgtagacattccgacgtgcgaactgggaaaagcagccgtggggcgctcacccacctgctgggaactctccaccaggttgtagaagaagccgtgctcatagcccggaccgggaagaagttcctgatggtgatggaaatagtcaccgatggacgggaagataccttgcgccacatggtcgcttccaatggcggggaagtagaactgcggcccggcaacggggacgaagatataaataaggtaatagatgaagaaagcggtgacgatgacgaacgaaaccttctcgaaaaggtcgaaacgataaaggaaataccacaccaccaccagcagaatcatcggataatagaagaagtatcccatattgaacggctcgctcacccacatctgcggaaacctttcacagaaccatacagcaggctgtccgccaaacatccactgctccaccgacgcgaacacgtggtcgagattggggaatatccggttgaactcaaaggtgtcgggataccaataggaaagcagtgacatctggatggctatgcgcacaaaggcagagaacttgcagggtgccagccggtaaagatacatcagcaggaacgtcatacccgcaatgacaacacggtctgcaagcatctgcaccggatgatccatttcctgaaaaagaaacagaatgagaatggaagtcagcaaattgtatatcagcgtaatcttctctaccgcaaaaagccccttacgggtttctacccttttaaataaatctaaagccatcccttatccttataccaggcaatggtttcctttacaccccgttccaggtcgtactcaggactgaagcccagttcctcgacggccggtgtgatgtcacactgccagttgcgttgtttcattattctatacttgtccgaattgagcgtactggtcttgttctgccgcttcgcccaaaattcagcgagcaaagatacgactttcaatacaattaacggacatctcaggcgaataacaaacgggttgcccaattctttccttatcaaatcggaaaaagcacggctactatacaccttcccgtcagccagaaaataggcgcggcgggacacctgcttctctatcccgaggaagacggcctgcacgatgtcctttacatatacaaacgtcaagtcctggcggcggaagcccacagaaaagtccgtatgctgccggatggactttgccataagataataatccttctcacgcggcccgtatacacccgtcggccggtagatgacgtaggggaaacccggaatactctgcaaataaagttctgttttcagtttactgagcccgtaggcggtattgggtgaaggggggtcactctccataatcgggtcgtaggtcctctcgcgtaccggaccgaacacactcagcgtactgatgaaaataaactgcttgggaatcatgttcagctccctcagcgtatcgatgaagtatttggtctgcaggtaattcaccaaatcgaattcgttcttgtccacgcacttcgtcacaccggcacaatgaacaatataatcaaacttattgtaggtccctttatgtcccgaaagctgcgccctcagttcattgggatgcgcaaagtccagttcgagaaaatgtatcttgcggtcacgcagatactcgcggctgctggacgagcgtacacccgcccacacaccgaacttgcgcttcaacgcttcctccacgatgaaacttccgataaatccgcttgctcctgtaattaaaatcgattccacttcttcagttacaaattactaattacttttcatccgattacttttcatccaatccgtcaccttggcgctcctttattactttgtcgcctcgttactcttcttcaccggctccacatggatgctgaccagtgttcctttgccgaactgccttttcaacttgttctccaccgccgttgccgtctcgtgagcttcctccagcgagatgctgccatccatacgcacatgcacctcgatggcacaataactgccgatgcgacgcgtacgaaggtgatgcggcgagctgataccgggaaaagagagaattgtctttattatctcatcctctacctcggcaggcaatgatttctccaacagttcgtccacacacggtatcaacaattgcacagccaccttcataatgaagaagctgacaataaccgccgccaccgggtccagcacccgccaatggtcacccaaaagaatggctccacctatccccactgccgtgcctatggatgaaagcgcatcactccggtgatgccaggcattggcaacaaccgcctgcgaattcaacttcctacccttgaaaacggtatattgataaagcacttccttgaaaacgatggataccaatgcagccaccagcgccagcataccgggctcctgcaaagaaccgccttgcaggaaacggtaaatggaggaagccccgttccagaaaatgccgaatcccacaaacaacagaaagacaccgataatggcagttgccagcgtctcgtacttgccatgaccgtaatcgtgcccctcatcctcgggctttgctgagatgcgcacaaatacaatgacaataatatctgtaatgaaatccgacaaagaatgcaccgcatccgccagcatggcggcactgtgccccacaatacctgcaaagaacttgaagacaagcaagagaaagtttaccacacttcccacaaccgtcacccggtaaatgtctttttcccgtgtggcatctgcttttttgttcagagtttgcatttccatctgcttttcgtctaaggtacagcctatctcgctttttgtgcaaatatagtacataaatccattacaatctgtcgtctcttcattattttcaatagaatgataatattttgaagtctgagtgaacgaaggaacgtatttatttgtttactttgcaagagagaacaatgtgcacattaattcattatcattatggccaaaaagaaagaaaagaaagccggcaaacgcatgaagaagaaagaactcgtcaaagtgttgcttgaattcttccacacaaagcaagacgaagtattatccttgaaatacatctttgaacaacttcacctcaccacacatccgctgaagatgctgtgtatggatatcttgtccgaactgtcaatggacgactatatcacagaagtggacaaacacaagtacaagctgaacaaccacggtgtggaaatgaccggaaccttccagcgcaaaagcaatggcaagaactccttcatccccgaagatggaggtgaaccgatattcatagccgaacgcaactcggcacatgccatgaacaatgataaagtgcgtatcgccttctatgccaagcgccgcggacgcgaagccgaaggagaagtcatcgagatactggaacgtgccaacgacaccttcgtgggtaccctggaagttgccaagtcatacgctttccttgtaacggaaaaccgtacgcttgccaacgacatcttcatccccaaagagaaactgaaaggcggcaaaacgggcgacaaagccatcgtaaaggtggtggaatggcccgacaaagccaaaaaccccatcggtcaggtaatcgacatcctgggacgcgccggagacaacaccaccgagatgcatgccatcctcgcggaattcgggctgccttatgtctatccagccgccgtagagaaagccgctgacaagatacccgccgaaatctccgccgaggaaatagcccgacgcgaggacttccggggcgtaaccaccttcaccatcgaccccaaagatgccaaggacttcgacgacgccctctccatccgcaaactgaaagagggactttgggaagtgggcgtacatatcgccgacgtgacccattacgtgaaagagggcggcatcatagacaaggaagccgagaagcgtgccacatccatctacctcgtagaccgcaccatcccgatgctccccgaacgattgtgcaacttcatctgctccctccgccccgacgaagagaagttggcctattccgtcatcttcgaaatgacggaaaagggagaagtgaagaactcgcgcgtagtgcataccgtcatcaaaagcgaccgccgcttcacctacgaagaagcccaggagattatcgaaaccggcaaaggagacttcaaggaagaggtgctccaactggataagcttgccaaaatactgcgtgagaaccgctttaaggcaggagccatcaacttcgaccgctacgaagtgaagttcgaaattgacgagaagggcaaacccgtcagcgtctacttcaaggagtcgaaagatgccaacaagctgatagaggagttcatgctgcttgccaaccgtaccgtagccgaaaagataggccgtgtgcccaaaggcaagaaagccaaagtgttgccataccgtattcacgacctccccgacccggagaagctggacaacctggcacagttcatcgcccgtttcggctacaagctgcgcaccagtggcacaaagaccgacatttccaaatccatcaaccacctgctggatgacatccagggcaagaaggaggagaacttgattgaaaccgtctccatccgcgccatgcagaaggcacgctactccgtacataacgtggggcactatggtctggctttcgattactacacccatttcacctcgcccatccgccgctatccggatatgatggtgcaccgtctgctcaccaagtacttggaccagggaggccgcaccgtgtccgaacagaaatacgaagccctctgcgagcacagcagtaacatggagcagatagcctccaacgcggaacgcgcctccatcaagtacaagcaagtagagttcatgaccgaacgcctgggacagaccttcgacggtgtcatctccggtgtaacggaatggggcctctacgtggagctgaacgaaaacaaatgcgaaggcatgattcccatccgtgacctcgacgatgactattacgaattcgacgaaaagaactactgcctacgcgggcgccgtaaaaaccggatatacagcttgggagacgccatcaccgtcaaagtggcacgcgccaatctggagaagaaacaactggattttgcactggtatagaataaccctataatttaaaatcatccccgatccctttctttcagagagagaccggggatgagacctgcacgatgaagacgattactattacggaccctacacagattgaggaaattatccgcaaatgtccatattgcatagtgggcatcacagaccttgaaggaaacccatatgcggttcccatgaactttgcctatcaagacggagtgatatacttgcattccggcccggaaggtagtaaagtggagatgataacaaagcacccgcaagtttgcatcaccttctgcgaaggacacgaactggtctatatgcaccggcaagtggcatgcagctatagcatgaagtcgcgcagtgtcatctgccatggaaaagtacacttcgtggaagacatggaagagaagcgacgcgtactcgacatgctgatgaagcaatacacggagaatgaatgcaaatatgccgaacctgccgtacgcaatgtcaagatatgggaagtgaaagtagagaaaatgagctgccggtcgttcgggttaagaccaagcgaactataaataccatctgccagctacctgctccacattgatggagcggataaccggcagaaatgtttgctcttacaatgggtattcctcaaacgcatacaacagcgtcgaaagataccgttctcccgtatcgggcagcagcgcgacaatcgtcttgccctcattttcgggcaaccttgccaggcgggcaaccgcagcaacggcagcccccgaagagatgccgaccagcaatccctcatacttcgccagttcgcgacccgtacggatggcatcatcattggatacctgcagcacttcgtctatcacggcactgttatagttcttcggcacaaatcccgcaccgataccttgtattttatggggaccgggctttccgccggaaagtacgggagaatcttcgggctccacagccacaatccttaccttcgggttattggctttcaaggctgcgcccactccgctcaccgtgcctcccgtacctacacctgccacaaaaatatccacccgaccgtccgtatcacgccagatttcctgtcccgtagtacgctcgtgcattgccggattggcaggattatcgaattgctgcaaaatcaacgaaccggggttggcggccttcagttcctcggcacgggctatggcgcctttcataccgtcaacacccggagtcagcaccagttccgcaccgagagctttcaagaggttgcggcgctccagactcattgtgtcgggcattgtcagtatcagcttgtaacctttggcggcggctacaaaagccagccctatgcccgtattgccactggtaggttcgatgagggtggcaccgggcttcaacagcccttttgcctcggcatcttctatcatggcaagcgccacgcggtccttcacgctaccggcagggttaaaatattccaatttggcgataacacgggctttcaaacttttattcttgttataattattcaactccaacaagggagtgttgcctaccaggtcggtaaggcgttctgctatcttcttcataatccaactgttttaaaaaccctcattccccctaagggaaaagactaacaatccggagtggaatgaggtacgttatttcttacaagacaaaagtagcgcaaaatcggttcgtgggaaataccacaaatatggtaaatatgtactataaatgagggatatgtaggatatttgacgagtatttcctatctttgcctccacttttaaacttaaggatatcataatgagtccactcaactttacccacattttgacacaagcagtcgatgagctatcggaaagcgaatcatacaagggattgtttcaccagcatacggacggcaatccgctgccttcggcaaaagcgctgcgcgacatcatcgaactggcgcgggccatcatcttccccggatatttcggaaattccacggtcaacagccgcacggtgacttaccatatcggtgtcaacgtggagcgcttgttcgacctgctgaccgaacaaatccttgccggactctgctttgcaggcgatggcgaatgcaattgttgtaccgagctccaacgggaagaagccgctttattggctgccaaattcatcagcaacctgccggccatgagacgggtgcttgccacagatgtggaggctgcctacaatggtgaccccgccgcacagtcgttcggcgaagtcatcagctgttatccggccatccgagccatcagcaactaccgcattgcacacgaactgctcaagttgggtgtccccctcattccccgcatcatcaccgagatggcgcatagtgaaacaggaatcgatatccatccgggagcggaaataggcggttattttaccatcgaccatggtacgggtgtggtaatcggcgagacctgcatcatcggcaacaacgtaaagctgtaccagggtgtgaccctcggtgccaagagcttcccgctggacgaagacggcaagcccatcaagggtattccccgccatcccattctggaagacaatgtgatagtctattccaacgccaccatattgggacgcatcaccatcggacaaggagccactgtgggcggcaatatctgggtgacggaggatgttccggcaggagcgagaattgtacagacaaaggcgaagaaatgagaagcctcaaacctcgtttaaaaggcaatattgctgcatttgtcaggcacttgtgtctgtcacgtcagacacaagtgtccaacacaacaaacaccggtgtctgagccaacagacgccagtgcctaacaaacgggaggcaaattactgataaacaatagaataaaaacagtaaaatagtaaataaatagatgagcgaacaatcttttgaaatgattgccaaaaccttccaaggactggaagaggtactggcacaagagctgactgcactgggcgccaacgaaatagaaataggccgccgcatggtatctttcagtggtgataaggaaatgatgtacaaagccaacttctgcctgcgtacagccatccggatactgaaacccatcaaacactttacagccaaggatgccgacgaggtttacgaacagattaaagccatccgatgggaagactatctggatacggacaagacctttgccgtggacgcggttgtattcagtgaagagttccgtcattccaagttcgtttcctacaaggtgaaggatgccatcgtagactatttccgcgagaagaccggcgaacgtcccggcgtgcgtgtcaacaaaccggacgtgctgctgaacatacacattgccgaaaccaaatgtacgctgtctctcgactccagcggcgaatcgctgcaccgccgcggttatcgccaggaagcagtagaggccccgctgaacgaggtgctggccgccggcatgatattgatgactggctggcgtggcgaatgcgacctgatagacccgatgtgtggttcgggaaccattcccatcgaagcggcgctgattgcacgcaacatcgctccgggcgtattccgcaaggagttcgctttcgagaagtgggtggattttgaccaagagctgttcgacacgatatacaatgacgacagtcaggaacgcgaattcacacataagatttacggttacgacaacagcccgaaggcaaacgaaattgccacacacaatataaaggctgccggcgtaagcaaggatgtagtattgaagctgcaacccttccagcaattcgagcaacctgcggagaaatccatcatcatcaccaacccaccctacggggagcgtatctctaccaacgacctgctgggactttactccatgattggcgagcgtctgaaacacgcctttacgggcaacactgcatgggttctatcttaccgcgaagagtgcttcgaccaaatcgggctaaaagccacctccaagatacctttattcaacggtgcactggaatgtgaattccgccagtacgaaatcttcgacggaaagtacaaggaattccgtgccgaaggcgaggagttgagcaaggagcgcaaagaatttcgtccggcttcaggagaaaggaaagagttcaaacccggagaaagacgcgaattccgtccccgattcagtggagagagacgtgaattcagtggcgaaagacgcgaattcaacggtgaacgcagaccaagagaattcaaggacggcgaaaagcgagaattccgtccgcgtgaaagaagagagttcaaagacggggaaaaacgggaattcagaccgagggaaagacgcgaattcggtggagaacgcagaacaaagtcgggtgagtcttacccggaaagaaaaagaagagaggcgggaaagaaggaagaagaataacacgaacaatgacaaggagaatgaatgcaaagaaaataagtaagagcattcttgcactgctgatggcagtgcctgctctgtttacaacaaacgtcatggcacaagaactgaaaaagccgaccctggaagaccttattcccggaggtgaaacctaccatactgccgaaaacaagtggtaccagtggtggggcgatgccgcttgtctggaacttggcatcgacaatatagaaggtacatgggctgtcaaaggattaggtgccaagcccggagagaaattcactgccatcacattggaagaagccaacgcgctgctggaagaaaaaggacttggaaaactgcgtcactttcatgctgcaaaggctgtcaacgtaccccgaggcgtcaatcagggtattcaagtccaaatagacccactcctgctgctgaacaccggcaagtaccgtgccctcgtcgactggaagaagaaaaaagtcatctggagccagccttgccccgcccaagccgcaaatgaggattggaacgaggtaagccgccatttggcttatactatcggcaataatctctatgtgatgaccagtgacgggcaaaccctgaaagtcaccaacgaaccggaaggtatcgtctgcggacaaagtgtgcaccgcaatgaattcggcatttcaaaaggcactttctggaatcctgccggggacctgctggccttttatcgaatgaacgaaagcatggtcaccccctatccattggttgacatcacgacaagaatagcactggtggataaaatacgctaccccatggccggcatgctcagccatcaggtaaaggtaggcatctacaatccggctactcaaaagaccatctacctggacatgggcgacccaaaagaccgctacttcaccaacatcacctgggcaccggatggcaaaagcctctatctgatagagctaaaccgagaccaaaaccactccaaactgtgccgatacgatgctgaaagcggaaagctgcaacaagtgctcatcgaagagagacatcccaaatatgtggagccgcaatctcccattctattcctgccatgggacagccacaagttcatctatcaaagccagcgtgacggcttcaaccatctgtacctatacaatacggaaggggaactgctgaagcaactcacctccggcccctggcttgtacaagacatcgtaggttttaaccggaacacgaaagagctcattatcaagagtacggaaatctctcctttgcagagcaacctttacgctgtcaacctgaagaatggcaaacgcagcctgataggagacccaaccggcgtgcactcggcacaaatctccggcttcatgggaacttacctcatcgacaatgcctcttcgcccacttgcccccgtatcataaaactgatgtccaccaacccgaagaaacaacgggaacacacactgctgacagccaagaacccctacgaaggctttgaaatgcccagcatagaagtaggcaccatcaaagccgcagacggcaagacagacttgtactaccgcctgataaagcctgccgacttcgacccggcaaagaagtatcccgccatcgtctacgtatacggcggcccgcacgcccagatgataacgaacggctggatgaacgatgcccgcggctgggacatctacatggcaaacaaaggctatatcctattcagcctcgacaaccgtggcagcagcaatcgtggactggagtttgaaaacgccaccttccgccagctgggcatcgaagagggcaaagaccaggtgaagggcgtagaattcctgaaaagccagccttatgtggacgaagagcgtatcggcgtgcacggctggagcttcggaggacacatgactacggcgctgatgctgcgctatcccgaaattttcaaggtaggcgttgccggcggaccggttatcgactggggatactacgagataatgtacggtgagcgctatatggacactccgcaagcgaacccggaaggctacaagcagacaaatctgaaaaaccttgccggtaacttgaaaggacatctgctcatcatacacgacgaccacgacgacacctgcgtgccgcagcacaccctttcattcatgaaggcgtgcgtggatgcccgtacctatcccgatttgtttatctatcccacgcacaagcacaacgtcctgggacgcgaccgtgtgcatctgcacgagaagataacaagatattttgaagaatatctttaatgtacaatgtaccatatacaatgtacaatttgctatgcagtgcgggcgtgcaaatagggagtagatggtagaagaaagaagagaataaaagagagaataaatcattaagtataacaatctgtacaacttacctgatgccccacagcacagacaaattgtacattgtaaattgtaaatgaacccatgaaaatattattattaggctccggtggccgcgaacacgctctggcatggaagattgcccaaagcccgaaagtagagaaactatatattgctcccggcaatgcaggtacaagcgaagcaggcgagaatgtgaacttgaaggcgacagactttcccgcactcaaggcttttgcccttgagaaagaaatcgacatgattgttgtgggccccgaagacccgctggtacaaggcatcttcgacagtttcaaggaagaccctgccacttgccatatcgacatcatcggccccaccgccaaaggtgccacactggaaggtagcaaggaatttgccaaaggcttcatgatgcgccacaacatccccactgcccgctacaagagcatcaccgccgacaacttacaagaaggactcgatttcctcgcaaccctcgaagcgccttacgtactgaaggccgacggactgtgtgcaggcaagggcgtgctgattctccccacactggaagaagctcagaaagagctgaaggaaatgctgggcggcatgttcggcgatgccagcgccacggtagtcattgaagagttcctcagcggcatcgagtgttccgtattcgtgatgacagacggccgccactataaggtattgcccgtagccaaagattacaagcgtatcggcgaaggcgacaaaggcctcaacaccggcggtatgggcagtgttactcccgtaccttttgccgacgaaacatttatggaaaaagtacgcacccgcatcatcgaacctaccgtaaacggtctgctggaagaagaaatcggctatcaaggcttcatcttcctgggacttatcaacgtgaagggcgaaccgatggtcattgaatacaacgtccgcatgggcgaccccgaaaccgaaagtgtgatgctgcgcatcaagagcgacctggtagacctgctcgaaggcgttgcccagggcgacctcgaccagcgtacgctggaattcgaccctcgcacagccgcttgcgtcatgctggtgagcggaggatatccggaagcctacgaaaagggcaaggtgatgaccggattcgagaaggctgccgaaacagacagcatcctcttccatgccggaacagcccccaaagacggacaaactgtaaccgccggtggccgtgtcatcgccgtctgctcctatggtgaaacgaaggaagaagccttgcagaaaagctaccgcgtggccgacatgatagacttcgagaagaaatatttcagaagagatataggatttgatttataaatgagaacgaagagattccagaaccggataacggcagggcggttcacactacccgccgctatcttgatttcagtatcctgctggatactgactgccgttctgttgcccgagacggagacacagcaaagcggatattccctttgggaaacattctgcgacttctgcatccccacctgggcaaaccgtctcttcagctttattctgtatgccgtcatcgggtatttcctgatacagctcaacaatacgttcgccatcatccggatgcgggcatcggtacagacttctgtctacttcctgctgatatccgtctgccccagcctgcacatgctgtatgcgggagacttggcatccgcctccttcctggtggcactgtttttcctcttcaggagctaccagcaggcacggcccacgggcagtctcttccacgcctttgtcttcatcggactgggcagcctgctttttccgcagctcatgctgtttgtccctatcttctggataggcgcctacaacttccagtctctccaacccaaaagtttctttgcttccttggtaggatggagcgtaccctactggctgttgctgggacacgccctctactacgggcaaatggaactcttctgccagcccttccgcgagctggtgaccttcgctcccatccggttcgactatcagccgtggaaactcgccacccttgggtatctccttgttctgttcatcgtcagcgcggcacactgtctcattgccggctatgaagacaagatacgcacccggagctatctacacttcctcatcctgctgaatttctgcatctttgtctatatcggactgcaaccggcattgagtgtccacctgatgtccttcctgctcatcggtgtcagcatcctggcgggacacttgtttgtactgacaaatagccgcagttccaatatattcttcatttgtgcatttatcggattattcattctattaggattcaatatatggacgcttttgtagatacactcgtacagctgctgattgactggggatatgtcggtctgttcatctctgccctattggcaggaagcatcattccgttcagttccgagatagtgatggtagcactggtcaaggtcggtctgagcccggcactgtgcgtactctccgccaccttgggaaatacgctgggaggcatgacgtgctactacatgggacgtctgggacgtatagactggattgagaaatatttcaaggtaaaaagggaaaagatagaacggatgcagcatttcctccaagggaaaggggcactgatggctttcttcgcctttctgccttttgtgggagaggctatagccattgcactgggcttcatgcgcagtaatctgatgctgaccaccacgtccatgtttgcagggaaactggtgcgctacatagctatgctgtgggcactacaaggagccatttcgatgatgaattattgacatgtagtgagtttgagcaatagatgtatagatacaacgcgttgaatgtatagatgcaacgtgctggatgtatagatgcagcacgctggatatataggcgcaacaacacgctgaatcacagagaattaaactaaataaaaacattcaacaaaagcagaagtgatgcaacgaatcatagagaagacggaagacggaagtgcgacactgtttgtaccggaactgaatgaacattatcattcggtaaagggggcacgtacagagtcacagcacatcttcatcgacatgggactgaaagcatccgctactgcccgcccgcatatccttgaaatcggtttcggcaccggactgaatgccctgcttacactggaaactgccgaaaaggaaaagagacctgtgcactatatcggtattgaactctatccgcttgcatggccggaggtggatgcgctaaaatatagcgacaatcctctgttcgaggaactgcatcgggctgcgtgggaagaagaagttgccataactccttatttcacactgagaaaagtgcaggcagatgtcgaaacaataaacattgacagtttgttaatgattaacaaatctccgtttgatgttgtctacttcgatgcctttgcacccgaaaagcaaccgggaatgtgggaggaaaaagtcttccggaatatccatgccgccatgagcactgatggcgtgctgaccacctactgcgccaaaggagtagtacgtcgcatgctgcaagccataggattcaaggtagagcgtctcccaggtccccccggagggaaacgggagatactgaggggaaggaaagaggaagtgataatggataaggaatagttgataatgaatagttgatgccccctgccacagcgcagccaaattgtaaattgtaaatagtaaattgtaaatgaaaaagttttgttttttactcctcatagccaccttgctcttctcgtgcaagcaaggaggccaacagaacaagaagaatgacgataaacccgtgattaccgtcaccatcgagccgctgcggtatttcaccgaagccattgccggcgatgaattcaccgtcgtcagcatggtgcccaaaggttcaagtccggaaacctacgaccccacgccccagcagctcgtcgacctcgcgcaaagtaaggcctatttccgcatcggctacatcggtttcgaacagacatggacggaaaaactgacggacaatgctccccacctgcaattcttcgacatgtccgagaatgtggaacttattctggacgagacccatgcgcatcaccataaagacggacatgtacacgaaggccatacgcacgccggtggtgtggaaccccacatctggaactccaccatcaacgcccaaatcattgccgggaacattctgaatgcactctgcaccatagacaaagccaatgaaaacgcctacatggaacgttacaacgcactcatccggcggatagagcatacggacagcctcatctgccagatgctttccagtccgaatgccgaccgtgccttcatgatttatcatccggcactttcctactttgcccgcgactacaacctgcaccagattcctatcgaagccggtggaaaggaaccctctcccacccatctgaagaacctgataaactcctgcaagaaggagaaggtacgcatcatctttgtacagccggaattcgaccgccgcaatgccgaccttatcgcccagcagaccggaacccgggtggtggctatcaatcccctctcatacgactggaaggaggagatgatgaataccgccagagcgcttgtaaaagagtaaacgatgattctgtccatttaacgaagaagaagctatgcctgcatcccccattatagagataaagaacctcagcgccggatacgataaccggaccgtactgcatgatataaaccttattatctacgaacgtgattttctgggcatcatcggccccaacggcggtggaaagactacccttatcaaatgtatactgggactgctgaaacccactgccggggagattctataccactcctgccccccatccccctccgaaattgccaattgccaattatcaactgtcaattgtcaattatccatgggttacttgccccaatacagcagcatcgaccggaaatttcccatcaccgtagaggaggtcatcctttcaggactcagcagcaagaagccgctggcttcacgcttcaccgcccggcaccgcgagaaagcctctgccgtgatagcccgcatggggctggaaggcatggagcagcgtgccatcggcgccctaagcggcggacagttgcaacgtgccctcctgggccgtgccatcatctccgacccgcaggtggtgattctcgacgaacccagcacatacatcgacaagcgtttcgaagcccgcctctacgaactgctggcagagataaacaaggattgcgccattattctcgtcagccacgacatcggcacggtgttgcagcaagtcaagtccattgcctgcgtcaacgaaaccctggactaccatcccgataccggcgttacggaagaatggctggaacgcaacttcaactgcccgatagagttgctggggcacgggacgctgccacacaggatattgaaagaacacaagcattctcacggatgactggaagcaaaggaggccggcccattgtagaaccgacctcccgttacccttccgaataactatccgacaatcttcttacccgtcatttatattggaaagccttatacgaatggggcagtaatgacaaacggaaagagttctttggtgtcaccggacgcctgctctgtacgggttcggcaggaaggggagccagaatatccccattctccagattttccaacctcgtcacctcatcatcggtaacaatacgcacttccaccggttcatcattgaagttctccaccaccagtgttttattgtcatacacaaacaatccgactttggagggagcctccaaatagatatccatatccctactcataatgcggcgaatctcattcaaggcttttgccggaaaatcatataaatttcccatatcatcgggaatggtcaatacatatagattgccggcggcatagggagctctcaacaaaataggataccccgatactcctcccgtcaacggacggcccgcactgactacttcccaagcatcattcgtataatactgaacctgcggtatcaataaatcgcgtccggcttgtccgtatcggccaaaatcattgacaagagctttcaaatcggtacaacgcaattccgctatttcggcaattttttcaggaatggctttcagcaagccgcttgtaatcaccacatcccgtccgctttgcaattgcttcctaatgtcggtcatgagctccggagcttgagccgcctgggcagtcagcagcaccacttgttggtctttcggaaaaacgggacgtatatccatcggcaaacctatcatgcccagataattctgcaagaaatcatcacccgccacatgaaaaggcttgtaggacttgatgccaatggggttacccaacttacctatcagtttatcagtctgtttcaatacaacatccgcaatgcgtgccatggtggtaggctctatggaagttccgtccttctgccggataggggcagtcatctcatcataattaaagctggtgcccatgccctgccaaggggtacggaacctgggagacaacttcacgcccagaagctggttataggcaaagagaatgatttcgggagccttggcaagcatggtcagatgcagctgctcagcatagcggtccatgcctagattcagtccaccggagtccacccatcctccaccgttgtagcccggacgcagattatcgaaatagcggataatattatagcttagataattctgcagatgctggttgccggcagggtcccttgtttcggtacccgtccagacaccgtcaaagagttggggaccttcctccagattaaagcccaaaccttggaaatggtcgtaccagttgggatacttgatgattacctttacacgaggattcaccttcttggcaggtttcagcacaaggtcgcgcccggcttcagtcatcagcttcaaacggtattccgtccagctctgcgcacctttggcttttatctctatgtccgacttgcaactggtgaagaaaaagtcatccagaataaactcgtcaaagtgctttgccgtatgttctgcaatctttcgcaccatctcacgatgctcgggattggaatagcagaacgtctcgaaactgtttgcctcgttgatggtgtaggtaattcctccggcagtctctattccccggtcatggaaaaatttcttagcttgctccagggtggcgtcatccacaatcagtaaatcacgatgtgtttccagataaatcttgtccacttccaactgttgtgaaatcacattccaagtcgaatccagccaatggatgtccttcatcttgtctacctcgtaggcacgtacatagaccgataccttaaaattgtcataagcttttgcctgcatggccatagtgcagaccatgcagagcagaaaagctacaattacaaacttatctacctttattttactgttcattaccattcaatattttctgagatgccaataccatatacataaaccacgtagcatgtccgcccaaacagtattcaccttcctgccataagaacgggaaatgaagtaattcgggcaagtcgggacgaatcagatttgtacccggagacactccacccggaatataagaccagtcggcacggttgacaccataggcagctttcatcgtttcggcaccgactcccgttacaaacgctgcctgattacgtcccggatgcataccgagcaggtattggacagcattgaaaatatagtccggtgcaaacaagtcaggataggcagcatgcaggtaacagtaattgtagcccagatgctggggttcccatgaaccggaagaacggttacctctgtcatgcggcactccatacggagttttactgctatactcctgatacatagcctgcaactccggcagtgctttgcgaacagccttgctgaaacgtgcatttcccacagctttgtcgaaacgtccgatgaaccaacccgtctgacggatattcttgcagatgaaatcctgctgctgcaaaacgaaatcacggtactccacttcctttgtcgccaaataaagttctacggcagcatgtaccttggctgtcagcacccggttgttgtcgcagcgggtaatcctgaacaattcacgggctatctccagacaatccgctctcaatgcatcgttatgtcccttcaagacacgtgaaatacctgccagccaggcagccacctgaagttccctaccagggttgtcctccgtaaacacccagcggtcgtcggcagtcccactgacatggtctgtatgggccgacgcatcacccaagtgtgcatactggcgtacggtaggacacagaatccctctgtagagacgccccagagccttccaacccgccactatcgtcaaagcaccgttttccacctgctgcaacaagtcattctttccatccggctggtgaatctcgactatcttcttttcaaaatctatggaagtctcgtcccaataggcaccaaagttctcacaagccatggcaagtatataggcctcgcctgcctgggattccacacgcaagtcatagtcccctgcatcgtgccatccacccacattcagccctggaaccaaatcacccggctggtacttacaaagagtagaggttccctgagtatatccgtctatatggttgatatcggttttggccatacgtgcatcgtcatgatgacagaagtcatgccatacacggtatttttcgttcacacgcatgtggcacatctgtaccggcaagaagtattccacctctgcctgccagatacccttgtcccacacatctttggcaatgcggaacaccggagaagcagcatcgccgtacattacctgatagagcccttcttccgtcacttccgtgaaatcgaactgcagatagtggtagcgttggaaatctccccaatccttggcagcctgctgctttaccagtttcctgccatcggcagcaatgcgataaagggcaggttgcttgaagtctgtatcccgtttatccaactctatgacagccactttcttctgtccaggatggtaacctacttgagaggcttgcaccaccggtgcataacgccagtctttagtgactgtcggacggattatccatttcaccgcaccttcctttgtccctgccgggaactccgaacggagcacaaaccaaccgttgttatgatttatccttccatcatacagcagcaagtctcctttctcactttcaatcgtaatctttgccaaatcatcctgaggattgagtacaaactttttccctgcggccaaaggagcagagacgatatcatcggcaatcatcgggttataagtctttctatccaacagcaactggtccaaatcagctttcccgtcagggttgaaatctccgatatgctccatattggaagactgtttcatggtgggccccatcgcctggtggggaaagactcccgtccggttgtccataatccacggcttgcccagcaaagtggaaggtaccaattccagattaaagcccaacttgccggcaaaccgctcgggcaccggttggtccaaatcaacggtcaataccagataatccttctcgcctttgaccttaatggtatagccaaaaacaaaatccggataaagcatcggattaaagcctgccatgtgtttggccgaatccggataactcaatgtgacacggatttcattgtcagcctcatccaccacccggcttctcatcttgggcaatccctgccattgcccttgcgagatttcaaagcgcacatctccattggcagccctgcggtctccattcaaaacaagggtcagtcctccctggtgtccttcagggtagacgtcactgaacaccatcacattggccccgccattctcaaaatatcccgatggattgattctgaaatcctgggcgtgcagccccatacaaagcatcagtgatgctgcacctgctataaatttcttcataaatactattttaaacgattatgtatttctactcccaagcgtaccgtatgatacgggcaacgccacatactcactttgggagtatccttcttgggttctccatcaaaacaatcactgtaccattcaccgtattcccggtctatcatacagtcctttacgaaagtccaaaccgtatcggccgattgcagataaacgtcattcccgctgatttgccaggcattgacacaagctatcatcgtttcaatctggccccaccatgaggcatgcccggttgttcttccgcccttcttttcatacatcatataccctttgtcactcagtccttccaccaagcaagcatccgtcacatccagcgcaagccgattcgccctatccatcagttgccggtcttctaacacacgggcagcctcacaaagcagccatcccgcctctacatcatgtccataagagtccatctcaaccagactgttccatgcattatcaaagaacaaattaaaatgcctccttgaagagtcataaatacggtccataaacaactcggcgcagaacttgagtcttttcctcagtccgtcgtctttccagcattgatataaaagggtataagcttccagcacgtgcaaatgcgcattcatagtcttggatgcattgttatcataattatccagttgtttccaatcttcagtaaaagattccacataaccgtcatattgcggttcgcggcctttctcctccaaggtatgatataaaccgacagccatatccagactctcgctgttacctgttgccagatagtgttcagccagcccatagatggcgtaggtcatggcatacgtatatttggaagcattcagcacctcaccgtcaggattgaccagccaatataccccaccatgttccttgtctataaatgtatcaatgaagtagcgttgcgatttatccgcaagcttcagataagcctcatccttaaacgtacggtatgcggcagaaaaactccacagaatccgggcattcagaacccctcctctcggagcatccactaccggagtaccattccgcaatacagttccataaaaaccgctgtcgggagccactgcataatccatccaaaacggcaacacgctgtccctgacattcgtgacaatctctgtacgcatgcgtgtctgcatatctgtctcccctgaatgcgaccggcagcctgccagacaagacgcaaccagcagtgctatccaataaaacatcttcctttccataattattctctaaaaccatcaaacttttccttgtttaattccccgtttatcagagactggtgttcgtcgtctcaagtactggtgtttgtcatgtcagacaccggctttcatcacgacagacgctgacgtctatcacaacaactactggtgcctgacatttcactcacaaatattttattattaagtgtttatttataatttatcaatatcccggattctggtcagcctgattgatgagcgggttggtcagaatctcattcgtcggaatcgggaagatttcctgataagcctcgtgctcaaagaaacggaatgagtcaccagtctgcagacaagcctcttgtgaagagttggctgctgtcttcggatattcggcggcaaaccattctttgcacatacccatacggcacaaatcatggtaaagcgagaactcggcattgaattcatggcgacgctctataatcagcgccaccttccataccggagaagtatagcctttggctgctttatagcttgtataataggtctctgcatccggcacttccaccgtctgggtattcaacatgtcggcgggtaggtcaatcatcgtcgctcccatctccaaattaccccaagcacggttacgtatctgacgtatcatgttccatccggtagcgttgtcacctgtctcgaaacaacattctgcatagtcgagcatgatgcctgcataacgcttcaaagtcaacgaaataggattgaatactttgttgttctcacctggcttgcatctccagtatttcaaggaataaacagtaggcatattttcggaaccttggaaaagaccgtcaaaaccacttgtcacccctacagtctgcccggtaatgggatgcgtatcccctttggcaacagcagagtattggcggcgtttgtcacccggttcaaaggaacgtacaaactcccaagaaagacagagagacccccagcctccccattcgggtgccgcacacatatatccgtaccacatcatggcatctgaagacgaatcggctccccagcccatatatccttgttcatgatacatcacctcaaatacagattctttggtccaatgtgtatcccaggcatgcaggttaccgaagcagggctccaatgaataggttccactgtccactatatcctttagttccgtcttggctttcgtaaagtctttcttcaacatatacagctcggccaaataagctttgcagaaccccttggttatacgtccgtattcaccattcatgggtaaccagtccagatggtcgcgtccaaaagacaaatcttcctcgatagccgcataagtctcatccacggattccggacgtgcctttcctaccgaagtagtataggtttcaccggtaagcaacatcggtacccttccgaaaagtttcgtcaggtaaaggtagttataaccgcggatggcacgtgcttgcgcttcataaacggtcttggaattgctgtccgcaaatatagaggcatccgccgtctccaggccagccaggaaacggtttgcacggtccactgcacgataactcatccgccatgcagtctccagggaacccttatcgggtttccaggcatgacgctgccattccgcatcccaaccggaagcctgacagtccatcgtagaatggttggcagcaaatacctgaggcttgaatccccatgtttcgtcatcaccggaaccgtgctggtccgtataaaaggtatcataaagtccgttcaatccggaaaggacattctcctccgttttaaacatgaaatctgccggaagaatatcgtaatgatccacttccaaataatcgtcacaagacgttacggtgcttaaggccagcacaccgatcaacagtttatataagtttttcataatcatattttttatccgttagtattagaactgtacactcagaccgaaagtaaccgacatcgggaacggataacgtcctccgtcaaatcccgaatacaatacattggagtcaccaacttccggatcgccgaacttattgtacgaagagatggtacatacattgtcgacactggcaaatacgcgtgcattttccattttcaccggtttcagcacattcttcgggaatgtatatcctatctgaatatttgaaatcttcagataatcccccttctggatgtaggcgtcggacacacgcatgttcttattatagtctgtcttggtgatacgcggatatttggcgccggtattcgaagatgaccatgcattattgatatattccttcagtacattctgataaccgccgtcgggtgcatagactgaggtcaagcgggccgaagaataagaaaggatatccataccggctacaccgtacaagttcatcgagaaatcaaagtttttccaggaagcggtaaggttcattccgtaagtgaacttgggatatccattgcctataacagtacggtcggcatcggtaatctgcccgtcaccattcaaatcaacaaacttatagtcgccgggctgggtagtcttgtcctgatatacaccactttcaactcccttttcaaccgccagcctattcatttcatcaatttcggcctgggttctgaaaatgccttctaccttccagccatagtaggaacctacaggatagccgttctgtgtaatggagtggttgtcccagttgtcgccatcttgtgctgaacctgacttgctgaatatcggatcgccgacttcaatagcctcgttcttcagggtagacccattcagtcttatgccgatattccaatcgctgaagctcttgttccacgcagcagtaaactcgaaacctgagttacggatatgtcccgcattagtatagacattggagaaaccggtggaaggacgaatctggcgatacagaagcagatcctttgcgtcacggataaagtaatcggcagagaaagaaagctcattgttcataaaggcaaagtcaataccgatatttgtctgctcattggtttcccatttcaggttggtatcaatttctttctgctgggcaataccggcaccgttaatcacactcgaaccattaaagaaccagtacattgcatttgccgaagacaactgtgctatggacaagttggtaccattgcccgcattaccggtctgtccccatccggcacgcaacttcaagttactgaacagttctaaatccttaatgaacttttcctcggaaagacgccaagctacagaagcggaagggaatgtaccataacgattgccggcaccaaagttcgaagaaccgtcgcggcgtaccgttgcagtcacaatatagcggtcgttcaaagtataagtcagacggccgaagtaagaaaggaatcttgtcttcaaatccagcccaccatccgtttgtttagacgatgggtcattggtcaatgaaattttgcggatgttgtctgccgggaaatcgttggcactggaattcagccaggcaccgttcgtatcgctggtagagaaaccggccattgcacttacgcggtgatgctcattggaccagtcatagttcaagaacgcttccagaccgagtgaagtggactggctctggttcagcgagaacgagtccttacggtcttgagttccaaaggttctatcattataggctgtatagccattataaccttttgtataataattataactggcaatagtcttgaaagtcaaccctttgtacaaatcgagttgtaggaaagcactagcaagcatacggtcccatttattaatactgccggcagtcttggcagcagcaaccagattgtcagctcccttgttcacgtctccattgccttctttcttgtaatgtccccaagtaccgtcgggcaacacaataggcatggaatagaaaacaccgtcctctacataatccatggttggaatggcttgtgcatagtttctcaggttgcctcctcccatcttttccgaatgtgcatagttcaagttcaagcctacatgcagaaagtctttcactttgtgagtgatattagcgcgtgccgtcaagcgtttaaaattcgactcaatcacgataccctggttgttcaaataacccagagataagttggcttgggtattttcgctgcctcccgaagcagaaaggttatagttctgctgtaatgccgtgcgtgacatttcatcctgccagtcaatgctgttcagtctgcctatgtaatcctcgccatatgccagattggtcatggcaataccgtcattcttgacggcggaacgtacagcacttgcaaacaagcccgcatcagccacatcaatcttattcgaattgaactggagggcatagttggccgaaaagttcacctttgccttccccttaccaccgttcttggtagtaatcataatgacgccattggcaccgcgagtaccatagattgccgtagccgaagcatccttcagaatttcgatggactctacatcattaggattcaagaaatcgatggaagttcctacctgcacaccgtccactacatagagtgggtcggcagaaccattcacggttgccacaccgcggatacggatggagaaacctccttccgggtcaccggaagaacggatgacagatacacctgccgcagctccctgcaaaccttgtcccaagttcaccggattccgcttcatcatttcctccgcattcacggaagccacagaaccggtgaggtcggatttcttcatcgtaccgtagcccacaacaactacctcatccaaggtttcggtatcctcctttaaagtaattttcagagcattcatattcccggttactttgaccgttcgcgctagataaccgatgtaactggtcttcagcgtagaacctacgggacactgcaaggagaagttaccgtccaaatcggtaatcataccgtttgtcgtaccttccacaatgacattggcaccgatgatgggctcgcctttctcatccaccacttggcccttcacagtaactacactctgctgtacgacagtgacacctgcaaacggctgtacgcttgttgcaaagagaggtccggcacatgccagcgatactgacatgatacccaaatacttcatcacatttctcataaatactaaatacttaggtttaacaaataccccggtcataagcacatcgggaaaaagatatgcgacacaattttgtgccactatagaggcactgccgtgccattgggaaggcacatctgtgccaccatagtaacacagatttcggtaactatatccctttctcttccataccggcaggggtgaattcaatatagattttcaaagattaagttcagaaactcagggaagtgccttcaacctggttcaacagttgcggtttggcctttccacaatccactttcacaacctgaatacggttgtcggcaggtagacaaaccaatccttccgcctgcttcttgtcagcactgtataccttcaggttcattttgctccaatccatctcaacagtggactgcgccaacttcagatgaggaagtaccgaaccgtcacgtaccagcatgattatcggcagactgcctgcttcaatttggtgccatccaccttcgtagactttctctgtctggtagtctatccattttccttcgggaaggtaaactgtgcggcccgtcataccggattcaagcaagggggcaaccagaatctgcgaaccgaagagatactcgtcatccactttccatgctcccggatcatcgggaaattctacaaacaaggctcttagcatcggtaagcccttttctgtacattccttagcctgagcatacacataaggcatcagacggtacttcatctctgcactcttgcggaagacatcctgcacacgcttgctgtcgtacaaccacggctctgtcggaggtgccccatgcgcgcgggtatgggaagtaagaaaaccgaacggtatccagcggcaatacaagtcctccggagtggcttttacaaagccacccatatcatggctccaaaaggagaaaccggacaagccgaaggacaagcctgcacgaagcgtacctagcagtcccgtgttcgtagttgcagcatcaccgccccaatgcaatggataacgctgggaaccggcccatgcggcacgtgcccacattatattctcgttgtgcaacttcttggttatctcggacactgccatatcataacgcactggatagaggttatgctcataccatccgctcttgccggaagcgtaaataccgttcagtggagcagcctcgccgaagtctactttaatggcactgacaccgatattcagcaatcccgccagtttgtcctgataccactttacggtttccggattggaaaaatcgagcaccacatcttcgtagggaagttcaccatttccatttttcacatacatgtctttctctatcagttcagagaaataacgatttttaggagtgaaataaggcaactgccacaaacatacatggaaaccttgtgacctcaaatccttcaacatctgctgtggattctggaaacggttctcggagaatttatagtcacactgccagtccacatcaaaccagccggtatcgaaatggataacatcgcacggatacttgttcttacggatattggccgctacatcataaccttccttttcactgaaataggtaatacggctcatccacgtaccgaaagaccacaaggggggcatgcccggctttcctaccaaatcggtgtactcgtccagaatatctttcggctcgccgaagaaaacgaacaaatccaggttctcgtcacccatgaacattttgttcagcccaatataggtagcaccaaaatcacaagtcacgggagcggatgtatgcataaacatgccatatccccggttactcataaagaaaggaatcggtttgtacatctggtccgtctcaggcccttgtgggtctgtaacaaacaagttcaccttctgtccggccttgttcagcccagtggcagactctccgcaaccaaaaatcatttcatccgcagtcaaggtaaataccggattgatgcggcgggcattgtcacttccccgcttcacaaaacagaacggtgtatattttacctgcgtagagtccgcatcactcaaagcggcagtctggctcaagatacgtccggctttatccttcaagacgattctccagggattcttgttaatctgaatggttccatagtcactggaatagacaatcttgtcattcgtctcggtaactttccagcttccatccctgcccggttcctttgccaacatgatggaagcggcaggtttaggttccaccggggtcgttagcatacggatacgtaccgtacgcggagttacaaagtcaatcttgaatttgaggttagggtcattttcataggcagtgaaaggaaaatcgagcattctcattttccggggctgtgcaccgttggtattgaaggcttgacggggcatcagatgcccgcgtttccagttcaccagcccttcacccgacttggcatcgaatgactccaggtgatctgcaaaaaacaaagtattactcaagtcacggaaatcggtactcatgtccagaggttggttcatcagatacgaggtaccgtcattgacatgtggctgtgccaacagattgccgccggcaaacaacagcatcgccactgctaaaagttctttcttcatactattaggatttaaatgatcttgcctgcaaatgtatttttcttaaaggaaacacagatgccttaaaaatgtcttttaatatccggttttgtttcatagaacccatatagggtcattggaaacaaaatgcatactatttttcaccaaacggaggatatcatcccacgcgaatacgcaaatcttcccttgctcgttcggaggattatatttaagtttgcagttacaatattgttaatccttctaataaagaaaatacatgaaacaactgctcctattccttatatgcaacctggccttcctccttactgttcaaggtaactcagcggaaatcccgccggctgtcatgttcaagcagctctctacaacagaaggactctccaacaacagtgtccgaagcatctacagagacaataggggattcctctgggtggggacagaatcaggactcaacaaatacgacggctactccttccagcagtattaccagaacaactccaacctgccggacgatgccatcagcgaaattttcgaaggaccggacgacaatgtatggataaggacttccagcggctacagtatctataattataagaccggtaaattcgacaatgactataaacccatactcgatgggctgcaaatccccagtaaaaacattctgaggatgggaaaaacctccaagaatgaattttgggcctacgactattccaaactttacatacgaagcatggacaacagctccatcaaagcctatccactggcagttgaaaagatttcaagcctctatataggtgtccagttcatttatataatgtactccaacggtatcctatacagtatcagcaagcagacttccgaagtcaaggaaatagccattcccgccatctatagacctttgctggagaatcatgagccacacatttacatagaccaaaacgaaaacctatgggtatacaccttccaaaacagcctgcttttgcacaagaacagttttacacagcaatgggagaacatcagcctgaacaataacactcacatacagtacaatcgcgtgcaacgcatcctcgacctgggagacggcaacgtatggatacttaccagccatatggggttgttcgtttacaacgccctgaccaaatctcttaccaacttggtgcacaatccattgaaaccgcacaccattgccagcaacaatctgaataccatttaccgggacaaagacggaaccatatacatagggaatttcaaacacggtatttcctattatagccccatgtctcaaatcatactatgcaacaaatccctggaatatgatgatatcctaaccttctgcgaagacacaagccaggaatccatttactacggaacagacggtacgggactaatccgacgttcactggtgaccgattcatacgaaaagatagcaactcccgccaatattgtagtcgacttatccatcgactccaaaaaccgcctatggataggcaccttccagaaaggactgctatgctactcgaaagggcaaatcaaacaatacacggtaagcaacagccagcttctcgaaaacaatgtgtatacagtagaggtggacaaacacggatacatctggataggtaccatgaaaggatatatacagaggttaaatccggaaaccgggcagtttgacaccatcttgtaccgtccgggagaattctttgtccgtgatatgtactatgacaaagacagcaccctttacgtagcaaccagaggaggactcattattatcgatacggaaacccaagcctataatatatacgccgaagccagccgtttcaaggagaacaatatgctcactgtctataaggacagccgggaccttctttggataggacatccacacggactgagcatatggaaccagaagaacgactccatctacttccttgaccagaaaaacgggcttgccgccaatctcgtcagagccatcacggaagacaacaacaaccaaatgtggattggcaccggcaacggcatctcacgaatcaaaataacaaacgatacatacaccatcgtgaactactccgtaagcgacggactgatatgcaacgataccaatgtccacgccatcctcaaactgcagaacggcaatatactgataggtactcctcaaggttaccagactatcattccacaagacatcctgaccacaagttatgatgccaacatttaccttaccgacattgaattcaaatccggaatgccccatccggacatcctgaacggcagctcacttgaatgtgcacaacatctttccttcactgaaaaggaaaattcattcactctgtccttctctgccctcgacctggtggaaacggataagataaaatatgcctataagattcattccaactggatttatgctgaaaacaacaaagtaaacctatccatgctgactgccggaaactatactttatccgttaaggcatgcaactcacaaggcatatggagccccaacgtcaaggaactgaaaataaagatactccctccttggtggcgcacctggtgggcctataccatatataccggtatcattttgtgtatccttctgtccattatccgcaatctgcgcttacgccaaaagcagaaacaaatcatgcaggccatcgaggtggaaaatgaaaggcagcagaaaatcaacaatatgaaactgcagttctttgccaacataagccacgaactgcggactcccttgtcacttatcatcaatccgcttgaagagtttttcgtagaccatcccgaatatcgtaaaggcattctggatatagtcaaacaaaatgccgactatctgctggaattgattaaccaactgctggatttcagaaagctggatgccaaggctgaaaccctgaaatgcaaacatgacaacatccttatcattctgagtgaaatattccactctttcgatccgatagcacagaaacggaacatcagctatagccttaccgctccacaacattctgtattcatggattttgactatggcaagatacgcaagatatgcacaaatatcctgtcaaatgcattcaagttcactcccaataaaggaagcatctcactggatattgccgtaagaggcacaaatcttgagctgacctttaccgacaccggttgcggcatagaagataaatccaaggagaaaatattccaaagattctatcagtcgagcaaaaaccagtcgagcaacggaggcagcggcattggactgcacattgtttccgaatacgtaaagatgcatcagggtactgtctgtgtcagggataaccagccttgtggttctgtattcctgattaccctacccctgcaccagaacagtaatgaaaccaaaaacggagaaccggtcgaagaaccggaaataaaggaagaatcccatccattcaccatactactcgtagatgacaactacgacttcttgaaatttctctctgaaagtcttgccaggcagtatcatgtattaaaagccacaaacggaaaacatgcactaaatgtactggaaaaggaagatattgatttagtggtcagtgacatcatgatgcccgagatggatggtctggaactatgttcaaccatcaagaatgacatacgctactcccatatccccattatcctcctgacagctaagacaagtgaagaacaccaattggaagggcttagcgttggtgcagacgactatatcaccaagcctttcaatatggaagtcctcaagctgcgcatcaacaagattatcgagatgaacgtcaaacgtcaggaaatattcaatcaggacattaaaatcgagccaagccgtatcaccatcactccccttgaccggcagctggtggaaaaagccatccagattgtagaggacaatatcagcgaaaccgagttttccgtcgaggagctggccagcagcctgaatatatcacgcagctatttctacaagaaaatgattaagataacgggaaagaaacccatcgaattcatcaggaccatccgtatgaaacgtgcacaacaactcttgacagaaagccagatgcaagtttcggaaattgcatataccttggggtataactcccccaaggtattctccaaacattttaaagaagagttcaacatcagcccatccgaatttataaggcagcaggctgaatagcaacattattttgacatcaaagcatccaacgaagacaccaacgccaccaaagcggcactccaattaatggctatctcattggaagcatacgaaccctccacatctgcataagactcatccggcaggttggaagcataagcaatgccatcctgctgcccaggattgggaccgccaaccaggaaaccgggaagaggtgcctctatatcatccgatgtagaaagacgatggtgcggatacagaggactcttcatcccgaaaccggtaacataacaatatcccgtagcattctttcctaaaatgtagtccatattgcggtaggcgttcgtcaggtacgacttctcgcccgtaagcaaataggcgcaaaccagtgaagtggcttggttagcacacccttcggcaaggcatccccagaagaaatctttggcatcgttgccgtaaggagcatggaaaggagagcggtcagcaccccgcacagcctcgacagcatagtccagtaacaggtctttcatggcatttgccaattccacgtcttcaccctgatattccctgcccggttgcagccaggcaaacacgcccaacgcagtggtattgccccaagaaggagtcttatatgcagtcggcagatgcttcttcacttgttcccggtaaacgggctttcccgtagcaagatagagctcggaagccgcccagaagaattcgtcatcggcactacgatcaccgtaagctcccgtaaccacggcaggttgatattgcttgttgaggaggtcctgatgatagagcgcttgcggatgcgcttctgcccaggcgtaagcacgttcggcagcctgtaaagccactgtcgaaaagcccggataatcctcttcgtaaggagtaaacaaggcagaagcctgcgccaaagccgcagcatagtccaatgccgccgttactgatttctgaaccacataacgaggctgcttacactccgtaggcttgatgaatccctcgaacgaaggggtagtcagcttgtggtagactcctccgtcggcagggtcttgcatagtcagcatccatctcaggttatagtacatctcgtccagcaaatcgggcgtgtggtttccgctttccgggatgttcacctgttgacggataaaataatcaggaaagcgggcataaatcgcctgcatcagtccaatggaataggcggagttcacaatatacttgttatagtctccggcatcataccatcctcccggagaagaaatcaccgttcccgccttacgttccggcccggcagcattgggatgtatcagtaccttgtcatcgggatggcctgccggacggctccaccgacccgcataagtcgcttcgatgggcatgcccgtacgttggtaatagaaagatttcaaagctgcatcggccaaaggggacagtactctttcttttatttcgaatgccactgaatctccgttaaccatcagaaaatagtttcccggtgccgtgatgtcactgaaatccaatatcgtcctgctcttatccgaccaagcagatgaagcaatatatccgggcttaccggaaaatacccgattacccgtggctgcatctactatggtaaattcacggacctcaccggtattcaccacagctactttttcctgctggggatagtaccctaactgattcaaacgtatagtttctgaaggatgccctaaagtggccatccctcccagaactgtaaacagacatgtagttatattcatatcactattctttagtaatcatttatattattctatttcaaaactatttatcagacaataaggtaatgaaactgatggccggcaagtgtacccgtacctgcccattctccactttcactgcagtttccttcatgcagtcttttgtattggtcacatagactttcagttccttcacttctgcagggataccggagatgaccgcctcgcaatccgccccattattgaccatatggacggcatattccccacgcaccatatttccgaaagccgcacagtttacgtttttcttgctgctactgaccggaatggccaaggcatcggccggagtggaggccagttgcttgatattccagaaacgttgcgtaggacgcaaaggacctttggaaccataaatgccgtctccccacaacaacgaatagtctgaagtaagctgccactgcaagatggacaatggctggcaaatggcacaaatacgcgtatacagattgatttcataaagtgcaaacgtcgactcattgaatatctcggcataaccatgagcagcggcatccgtactaccctcaccaaccaagagtggtacattgatcgctttggcagcatccgcccacttctttaacgtaacatcatcacaaccacgccatgaatggaaagaaactgcaccaatatacttatgagtctcaagattgttcaaagcaggaaggatgaaatcgaaagtcgtggcatccgaattgtcgccaagcagcatgcgggtaggaagattcaaccctgccagataagcaccgaactccttaatgaaatctgcatgttcctgcggagtgtggaggacatcaatacccaaatccgattcattgaacgagaacatggagaactcaataccataatactgtttggcatacaacagataatctgccatggatttataaatcttctcctttttccggttatccagacgataagcaatgacaccgccttgacgagcataacttgcaggacctccgtcaatggcccacgcaggtggaaaccagcagcttagtattaccggcattcccatcgccttcaagcgctttgccatgaggagactttcctccacccgcttgttcagtcccccattctgtgcggtggcaatagggtcggcttcctcttccggttgccacaatctccacggaaattccacacgtccataggctacacgcaaattttccagacagtaatctatcactttagggtcggcagcaggattctgcaggcggaaattccctccaaagcctgtaaacagactgcccggattctgcatatccaatataatttccgcgtcactatgatctatcactccggaagcatgcagtgccatggacaatgcagttctctcagcctttttcagagtcggcatcagcgagatataaactacggtaccggtggattctttttcaaccgtggcctttacagacttattgaacttgaattccaacttcctattagccgaagtaacggtcagcttcctgccacttgtccttactttggcatcagcgtagttttccggacttaaagcaatacagtaataggctgtctggttcaaagtagtgtccgacagcgcatcaatagaaatctccaccaagccttttcccttatcagtcactttctgatggaactttacacctcgcagagtagtcgtcacttcctgcatatccccctcacgatggaaaacgggacggacctgcttctcctttccggtaatctccatatcccctttcaaggttccgacacgcagggacgactcaaagtctatcaattcaccgtctacacggacacccgtgatattgctccatgccatcacttccgtctgggcagaaagcggcagagacaatatgccacacagcaatgcagccattcccaactggaaaattcgtaaattcttcattatatcaaatatataaaaggttgtcatttcagtcttgtatcaatctcaaaccccatacggctgttatgataaggacaattccacatacttgctttaggttccttgtagcggggagtcccatcttccagcacagttctgaaccattcgccatactccttgtctatcatccgtgatttgatgaagttccaggtacggacggcactgtccagataagattgttcaccggtcagctgccaggcattgatgcatcctaccacagtttccgcctggcaccaccaggaagcatccttcctgattttgtccttatgccgttcgtacatcatggcacccatcgggttgatgccctctttcaaggaggcgtctgcaagttccaaagccacttccctgcatttcccgatgacctccgggtcacccagagcttctgcagcttccgtcagcagccaggaagtttcgatgtcatgcccgtaagagtcaatgtcatccagattgttccagttcgaatcacagtataatatcaggtgatgtgtttgtgagttatacagtttggttgttatcaagtttatcacttttgcaaggcgctcgcgaaggccgtcatctttccatactttatataacgctgtgtatgcctccaatacatggatatgggtattcattgttttggtggcaacaccatctccatcatatcccagctttttgggaacttcccattcgcgggtgaaagattctatataaccatcgtttacggggtctttgattctgctctccacggtccggtaaagctctatggctttttgcaggctttcattgttgcctgttgctctgaaatgttcggacaaaccgtagatggcataagagcagccgtaagtctgcttgtccgtatccagtggagtaccgtctgcttttatcagccaatatacgcctccatactgcgggtcgatgaagtggtctatgaaatagcgttgcgccctgtcagccagtttgcggtaggcagcatcgccatacatccgataagcggttgaaaaagtccagaggatgcgggcattcagtacgcctcctttgggagcatccgctatcggggcaccgtcacgtcccaatgaaccgtaaaaacctccggaagggtctacactgtatttttcccaaaaagagaggatattctctttcaagtctgaggttatctcatcttttaaaatcttatccgcgtgtgattgcgcttttaggaaaggtgcaatcagcagccctactacaatcagcagaaaaacgggaaataggtgtctcataatgtagcgatttaagaaattggccatagttacactgcaaatttacaaaaaaacaagttgtcattactcattgccatcctttttcaagggatacaattggttccgataaaggtcatttttgggtactgaatccttgttttgtcaaacaccagtgttcgtcaagtgctacaatatctgccccagaaacataggcaaacaccggaaaaagatacattttataacgttattggctacaaacaaaaaccatccgtttcctttttagtccgtatattagtggagaattctgtaactcaaaaatagatactatgagaaagagacattttctattcgcatccgccctggcactgctctgcagtagcggtgcactgcatgcacaagatttcaagctgacatcttccggttatttcaagaaccagggagtagacgtcatggcttttgatgacatctatcccgagggacaccaaggaggagtatgtatcatcatgaatggacaccgcgtagcaacgaatggagacatccgactggaagccacccccggacaatggcagcccgtaccgaaacaactcgaccggaagctcagcgacaacagcatcaccgctacgctctgctatcccgactcctcacgccacctcaccggattcaacccgatgatttacccggatctccaccttatatatacggtacaagtggaaagcaaaggtaaacacatagaggtgaccgtagacctggaccgccccattccccaggaattcatcggaaaagtgggcttcaaccttgaattcttcccgggttccctcttcggcaagccctggattatggacggtcagagcggcatcttcccgcaacaacccaactcccccctaatgacaacccaacccaactatctgcatacgggaaattatcatgacggcaagcaatcgctggcagacatggacaaactgataggaaaaggttacagcccgattgtggccgacgacatcatcagcgaaccttatgccaaaggccgtaagtttacctcccgccccgacgacccttacaacaaagtaaccatcgaatcattgagtggtgacctacaactgtttgacgggcgtatgaaccacaataacggctggttcgtactgcgcagcaacataaaaccgggtgtcaccaaaggggtcgtcaaatggattatcactccgaacgtagtggccgactggatgtatcagccggttatccagacttcacagataggttatcatcccgcccaggacaaggaagccgtcatcgaaatggatatacgtgacaatagaaaggaaacggcacaaatcatccgcattgacgcagacggcgagaaagtggtcaagaacgtcactcctgccaattggggcaagttcctaagatacaactatctgaaggtggacttcacggatgtgaaggaaccgggactctacaagattaaatacgatacctccgtatctcctatcttccgcatcgacaatgacgtatatgcccgtggcgtatggcaacccgtactggaatacttccttcccgtacagatgtgccacatgcgcgtcaacgagaaataccgcgtatggcacgactgctgccacatggacgatgcccggatggcaccggcacacaatcatatcgacggctacgaccagaaagagggcctgtccaaattcaaaccgggtgaagtggttcccggagtgaacataggcggctggcacgatgccggagactttgacctccgcatcgaatcccaagccggagaatcctatatcctggcactggcctacgaagctttccgcccgaatctcgacgtgacttccatcgaccagataaaccgtgtgacggaaatccaccagcccgacggtaagaatgacctgctgcaacaagtagagaacggcgcccttacggtagtcaacggctacctggcactgggacgtctctaccggggaatcatctgcaacgaccttcgccaatacgtacttctgggtgatgccgccgccatgacggacggaaaaatcggtaatgaagacgaccgttggatatttacagaggacaaccccggacgagaactgtcgacagccgcccaacttgctgccgtatcacgcgtattgaaaggcttcaatgatacattgagtgtacattgtctcgacattgcccgcaaagtatatgcttctaccgaaagcggcaacaacagagccttgttccccaaagtgcaggcagccgtagagttgtacctcaccacgggcgaacaaccctatatggacttcatcctggacaaccaggagctcatcatcaagcagataggccgaatcggctggtacacggcacgcgtagaacaacagtttgcacagatgaagaacaagaaagccaaagccttctctaccgctttccgcaaagctctggccggatacaaacaagaactggacaagcaagtgcatgaaactccttatggcgttccctaccgtccgaatatctggggtgcaggctgggatatacagcgtttcggcttccagcactacttcctgacaaccgcctatccggaaatattcccgaaagcaccggtattcaatgccctcaacttcattctcggatgccacccgggctccaaccaggcttccttcgcctcgggtgttggcgcacaatcagccactgtaggctacggactgaaccgcgcagactggtcgtacattcccggtggagtcatttccggtacagcgcttatccgtcccgacttcccggaactcctgacgttcccgttcctctggcaacagactgagtatgtgttgggaggaggttcgtcccactatatgttcctggtacttgcagcagaacagttgctgaaacaataagaaagacagaggggggaacaaaaccctctggatattttcttttaggcgcggattacacggatttagtttactgcatccatggattccgcgtaacccgcgcctaatattatagtataatgaaagtgtttatctactttccgttctttcaccaattatccgtacggaacggaatggtaggcaattcatttccgccaatcatcgtaccaatctggaaatcatggaaacagtagcgcacgctgacgggatgggataccttttctgaagagattaccacttcattcgtctgccagtgcagccatactttatcggcaggatgaaatacacggtcctcgcctgccacttcgaagccacgaaggtcatagttacggcagatacccatttccaggtggtcgaaagaaacccaggcttcattgcctttagcagtccatgacttatattgtgggccgaaacagtgtatctgcttcaatccataggtgaggttcaatgccagataactcaaacgttggcccaccttcctcttgttgcggggatggatgttgtatatctcgtaaggttccacaaggtcgttggtagaaatcatggcactgttcggaatctggctttgggcacgaaattgcgcttcgcgcaggtaggcagctttctcttgctgagtgcctccataggcataaggagctatttctgcaaagtaaaaaggcaattcgcccagtccccattccttgcgccacagctgcaccatgtcggccagacgctcggcgtatgtttcatgacggcctacgttagactcgccttgataccagatgaatccctttatggtatagttctgaagcggcttcagcatggcattgtacatcagcatggggcggtgcatggggtgcaggcgttcgatggaatcggggttgagggaaatgtccggatagttttccagcaactcccggcttatccaaccttccacagtggctccaccgtaggcactgctgatgatacccacgggaatacggagggcacggctcagtgaagttgcgaaatagtaagctgttgcactgaaatcgggtgcggtctcgatggaggagaggttccaactaccttcgcagtctgtttgcggttcatacgtctgatgcttgggaacggtgaacatgcgcacacccttattttcggcagaagctatgatatcatccaccccattcatgatgcaacagccggcaaaacctttcaagggcatttccatattactctgaccggaagcaagccatacttcaccgattaggacattcttcaacgtagttttttctccatcatcaaaagttatctcataaggcgtgtatcctgctgccggagttttcacggcaagcagccaacgtccgtctttatcggcacggcaagtggaggtttgtccgttccacgagggggttacacgtacttctgccttcggcgttgccgttccccacagttttacttccgtctgttgctgaagaaccatattgtcacttaccagtgcaggcagttttaccttggcgcccaatgaagcggcgcagcataatagaatcaatgcaagagttttacttttcatggcatatttgtgtttactacttattcagaattcaataacgtgagcaaaaatagggcttttttgctcacgttcatcctttttcaagtcaaaagtttacatcgcattgttccgcagcaatcgtaggaatcaagtcatctttaaacctacaatagaagctatcaacgtagtaataaagaacaaacggatgaaggaaaccgactcatcaaagaatacaatccccaatattaccgtacttaccgcacctatccccgtccacacgggataggccgtcccgataggtaacgtatgcaccgccttggcaagcagcaacatactgatggccagacagacaagaaagcctgcaccccaaagataatattccgtacccgtaacgcctttcatctttcccagacaaaaggcaaagcctgactcaaacagtccggctacaaccaaaataatccagttcatactcaattcttctgtttcattatacatttaaagagggagcaaagataacctttcccgtactcctgccactttacatttgataagaagcaccggataaggtcgaaaatcgtatctttgccacactaagaaccaatacttgcctgataatgaacaaatacgatattatccataccatatatccaatgccaaaggcatctgtcgacaagctggtggagaacatcacggaagtggcttaccccaaaagttccctcatactggaagccggaaagacggagagaaacattttcttcgtcggaaaaggtattgtccgcgcctacgtggaagcgaaaggtaaagaaatcaccttttggattggtgccgagggagccacagtcgtttcactgaaaagctacatcgccaacgcacccggttatgaaaccgtggaatgcatggaggacgtcattctttacgtcttgaaacagagtgtcctggcaagattgttccaagaagacatccacatcgccaattggggacgcaagtttgcagagacagaattcctgcagactgaagagaaattcatccccttgctgtttacttccgcagccgaacggtacgaagtactgctgaagaataacccggaactgcagcaaagaatcccgctggaatgccttgctacgtatttggggattactccggtgagtttgagcagaattagggcggggattggaaaacgacaaggctgaatagaaataaaagaaaagaaattatacatgaatgtataatctgtatatttgtcattaaatcaagaacaagcagcccataaaatcaccttttcaatacggtacattggtcgataaaggggagcagtacatattctccaacccggtatttgagttgtggttcaagagggagtattactgaaagactctaaattcactaactttgcaacataaacaaaaaacaattacacaatgaataaacatttatactttggattgcttatgagcatcttaatgaccggttgcgccgagagtaaaccggatgcggcagtagagaaagaaacactttcatcctgcaacgtcaaactcagtaacatacaatttacccaagccaagaacggggcagagaacaatgtcaccgtattcaacaacacactgaagtttgttgccggtccgcagacagactatttccgttcgccggatggaactgccatcaacaactcacctgttatctttacagagatagacaacacgaagccgttcacctttacagccaaagtggaaccgcagttcaccctgacgggaacatactcagccggcgtactttatgtctatgagaacgatacccacaaccagaaactatgctttgagcaagatgaaaacggagcacaccgcgtggtgagtgtccgcaccatcggaacttccgaagtggcaagcttgataacgaatgaagtaacgtaacgtcgatataactcaacacattgtagaatgcccatcattaatgttattcacatcaatggtgggtattctacttttaccattctgacactttgtattttctatcgtatgaggatcccccgtatttccatctctctgtctatacgaaaggaaattcgagaacaaaaacatataaaatacagattataaggaatatatcaaagcatacctcctcctaataaattgaaaatatatctccgaaagccttgatacgccgagaaagcaaagacaaaagcaatgctttttgccacatttacagaaatatccctatctttcaagcaatccacccagttcccacgcccgcacatgccgtattccttcattggacggcaggcagaagtcatcaagcgagacaaccagtttctcataattatcttgtatcgcctccaacgaagcatactcacggcgcaccgtctgttcatctaccagcatgtaggtggattgcagatatatcgtacggtcacctttccgagcgatgaagtccacctctttttctttagcacatccggtatagacatcatagcccgcccgaagcaactccagatagacaagattctccagtttataacccacaccataggctgttccgggatagaggaaattcttaaaggcaaggtcgttgatgtaatatttcgccgtaccggacagtatttcctttccgcgcaagtcgaagcgttcacaacgatacgccaagaacgagtcttcaatatagcctatgtaggcagccacggcatcatagctcgtcttccggccttggatcttgaaatagttcacgatgttgccgatggacactaaattagaggtattgcctacaagaaacgtaaaaaggtcctcaagcagccgggggtcacgtatgctgtagcgttggatgatgtccttcagcaagatggtgtccttcaaggcagacaagtaattgcgctgcacctcctgcttttcgggcaagacaaaaaggtccgggattccgcccgtattcatatagcccatatagctctcacggttctgttccagatgccttatctctgtatactcctgatagctgaagggatatatcggaaattggacgtatcgccccaaaagcagcgtggcaagctcaccggacagcatccgtgagttggagccgctgataaagagctcgtactcctcggtatagtcctgcgaataagaattgaccgacttttcccattcttggatgagctgcacttcgtcgatgaaaatatatatcctcccctgagggtgcagttcgcttttataaagcgtcaccaactcttccaaatccttgtgagtcttcaaaaaagcaaagtcgcttagttcccggttgatgaacaaagtgttctgcggagggacaccgtttcttatcagttcccttgctatctgtctcaacacataacttttcccagcacgccgctgaccgatgagcacctttacaagacgattgcctacgtagtccatgattctgccggtataagctacccgcatgaaaccgaagtcaaaatctccttctgtccagagattgtacttcctaagtatatccattctttcgtccataacctaaactttagttacaaagataacaattttcggttataaacgaacatttccatcaattctttcgttcataacccaaaaagtttgcgaaaaaggctagattttcggttataaacgaaagattcatttagacaagcaaggaggatacttcctttccgcatcccctttatcggccggatattccctctatagaatcatcattgttgcatctatatatccaccgcgttgcatctatacttccaccgtgctgcatctatagatgcagcaaatcccttaacctatcctaataatgctgcttattgtcacctatttagaagcgaaatcattatatttgcgcccatatatgccaatacgttgactaagcgatggcaaaacagcttgtaaaaaacaaaactgaataataacgaatttcatctgaatgaaacagtacaaaaccgtaaacaaccttgtaggctggattaccttccttattgcagcgacggtctactgcatgaccatcgaacctactgcaagcttttgggactgcccggagttcatcaccaccggctataagctggaagtaggacacccgcccggcgcaccgttcttcatgctagtagccaacctattctcacaatttgcttccgatgcctctaccgttgccaagatggtgaactacatgagcgcgctgatgagcggcgcatgtatcctgttccttttctggagcatcacgcacctggtacgcaaacttgtggtgacagacgaaaacaatatcacacgcggccagatggttaccatcatgggtagcggtctggtgggcgcacttgcctacacgttcagcgataccttctggttcagcgctgtggaaggcgaggtgtatgccttctcctcactgttcactgccgtcgtattctggctcatactgaaatgggaggacgttgccaacgagcctcacagtgatcgctggctgattctcattgcctacctgaccggtctgagtatcggcgtgcacttgctgaacctgctctgcctgcccgccatcgtactggtatactactacaagaaagtacccaacgccaatgcccgaggctccctgctggcattgctcgcttcgggcatactggtagcagccgtactctacggcatcgtgccgggtatcgtgaaagtgggcggctggttcgaactgctcttcgtcaacacgctgggcatgtccttcaacacgggtgtcatcgtatatatcatcctgttggcagcctgcctcatctggggtatctacgaaagctataccgaacgcaacaaggcacgtatggcactctcgttcatactcaccatcgccatgctgggtatcccgttctacggacacggtaccagctcggtagttatcggtgtcattgtcattgccgcattgtggctctacctccgtccgaagacgcaggcagccgtcaaagagaaattccgcgtatcggcacgcacgctgaacacctcgctgctctgcaccatgatgattgtcatcggatattcctcgtatgcacttatcgtcatccgctccaccgccaacacgccgatggaccagaactctccggaagacatcttcacactgggcgaatacctgggacgcgagcagtatggcacacgcccgctgttctatggccctgccttctcctcgcaagtggcactggacgtgaaagacggttactgcgaaccgcgcatcaagtacaacggcacgaagttcatccgcaaggagaaagctacgcccgacgaaaaggattcgtacatcgaaatccccggacgcattgagtacgaatacgcccagaacatgctgttcccgcgtatgtacagcagtgcccatacacaacaataccatgcctggcaggacatcaagggttacgatgtgccctatgacaaatgcggcaacatgattatggtaaacatgcccacacagtgggaaaacatcaagttcttcttctcctaccagctcaactggatgtactggcgctacttcatgtggaacttcgccggacgccagaacgacatacaaggcagcggagaaattgaacacggcaactggattaccggtatcccgttcatcgacaactggctggtgggcgaccagagcctcttgcctcaggaactgaaagacaacaagggacacaacgtattctactgcctacccctgctgctgggtatcatcggcctgctatggcaagcctaccgtgggcagaaaggcatccagcaattctgggtggtcttcttcctcttcttcatgaccggtattgccatcgtgctctacctgaaccagactccgagccaaccgcgcgaacgtgactatgcctacgccggttcgttctacgccttcgccatctggattggtatgggtgtggcaggactcgtccgtctgcttcaagactatgccaagatgaaggaactgcctgctgccgccatcgtttccgtagcctgcctctttgtccccgtgcagatggcaagccagacttgggacgaccacgaccgcagcgaccgctacatggcacgcgacttcggccagaactacctgatgtccctgcaagaaagcggcaacccgattatctataccaatggtgacaacgataccttccccctctggtacaaccaggagaccgaaggtttccgtaccgacgcccgtacctgcaacctctcgtacctgcagaccgattggtacatcgaccagatgaagcgccccgcctacgacagtccttctctccccatcacctgggaccgtatggagtacgtagaaggcaccaacgaatacgtccccatccagcctgagtacaagaaaagcatcgaccagctctatgccgaagccgagaagcaggcactggacggtaatcccgaagcactagtcaatgtaaagaaagaattcggtgacaacccgtatgagctaaagaatatcctcaagaactgggtgcgcaacaagaatcaggacttgaaggtgattcctaccgacagcatcgtcatcaaggtagacaaggaagccgtgcgccgcagcggcatgatgataccgggcgactcaatccccgactacatgcacatttcgctgaaaggcaaacgcgccctctacaagagcgagttgatgatgctcgaaatgctgagcgaggccaactgggaacgccccatctatatcgctgtcagcgtaggcagggagaaccagctgaatatggaaaaccacttcgttcaggaaggtcttgcctatcgtttcactccgttcgacaccagtaagacgggcgtgacaatagactccgaaaagatgtacgacaacctgatgaacaagttcaagttcggtggcatcgacaagccgggcatctatatcgacgagaacgcaatgcgcatgtgtcactctcaccgtcgcatcttctcccaactcgtgcagcagctgatgcgtgagggcaagaaagacaaggcaaaagccgccctggactatgccgaaaagatgattcccgcctacaacgtgccttacgactggcagaacggtgccgtacagatggcggaagcctactaccaactgggcgaaaccgccaaggcggacgagatgatgaaagcccttgctgacaaggctgtagagtacctgacctggtatctgagcctggacgacaaccgcttcatgatttctacccgtgaatttgaataccactgggctgtactcgatgccgaggtgaaggccatgaagaagtacaactccaagctcgccgaaatctacgagccgaaggtggaagaactgtataatatgtatgtggacagaatgaaggagtgagaataaggattagggattaaggattaaaggattagggattagcctgtgcagttcatcactaatcattaataactaatccttaacccctaatccttaatcattaacccctaatccttaatccctaatcccttaatccttaatcacgtgtttatagaacaacctcctgagttttttcgcaaactatatcccggtgcagtctggaggatggaccccaatgaaaaagccgtttatctgactttcgacgatggccctatccccgaagtaactccctgggtgctcgacctgctggataagcacaacatcaaagccaccttcttcatggtaggtgacaacatacggaagcatccagacgaattccggatggtcgttgagcgtgggcaccgcatcggtaaccacaccttcaaccatatccgtggatttgaatacacggccaagaattatctgggaaataccgaacaggcgaagattttcatggaaatgggtggggacatcaattgcaatgtggagaaggttctctaccctctcttgttccgccctccccacggccatatgttcgccaaccagtatctcacgctgaaacgaacctacaagattgtgatgtgggacctcgtgacccgcgactacagcaagaagctgcgcggtccgcaagtgctagccaacgtgatgcgctacgcccgcaacggctccatcatcaccttccacgattccttgaaatcctggtgcaacggaaacctgcagtacgcattgccgcgcgccattgacttcctgaaggaagagggatatgaattcaaagtattataaacttgaaacagcagaaagttaccaacatctgctgtcacaataaattccacataaaataagaaggggttgtctcggcaaaaggcaaccccttacattttataggctcatgtcctgttccacaagaataaacagatgttttataattaccaagtaaatgtacatctgtattcatcccactggtcttttacaaccagttccgtaggataactgtcggaattcaatgtccatgtaaaatacatatcggacacagagtcctcgccattgtatgtataatgccctacaagcggcagatgtttcgtagccttaccaagcatgcctccataataggcatatatcatctcgtccatatccacatccagtatttcatcaaacaacatcaggcagcccttattctcgataggagctgttatattatccgtcgtatagtctatggcagcactatactcccactcgtcattgctgtcgataattccgtcaccattgagatccccactagctacataacgtgtggaagtcttcaccacatctccatccttataggtgatgttcgttatttcaccatcgctttcagagcgtttcattacaaccagatgggcttcagtgtcgtattccatctcccaagtaaactcatcggcatcgggagtaccagcgtggtctattgagttgcaaaattccacataaccatcgctgttgagctgcaagttcagttctgtaacatcgccctcttcatccgtcacggtgattcttgctcggtcctttgcaacatctgcctttgtagtagcgggaaagtactcaaagacggctttatccccatcctcagttgtaatgttcgtcaccagcccttcttcattgtgagaaatcgccatgcccgaaaccgacttcggaagccctcccgtaaacacttgcgaaggattgaccacagtggcggtgttttcgccaccctcaccattctcattttcgtcatcgtcactgcaagcagtgaatcccaagcacaacgccacacccaacatggaggcagccatcattttaaacattttcataagttacaaatcttgttttatccccatccctctaaggaaaatccataataacaaaagtataaggaatgccgtccgtatctcacgacaacaagactctgccattcaaacccggacagatacttttggccatttatcattcccagacaaagcttaatattttttgcaaagtaataaacttttcctttcactccttgtcactgaaaaaggtgatttttcagccacatacagaaaaaattcagcatctccaataaaaagcaaaatgaataagacgtatatttgcaacaactaagcacagattgaattccactaaaatataccgatatgagggtacgccatactaagctattatcactcctcttttctttaaccactatcctgcttcacgccggagaaataccaacagacactctgttggcacacttctacaaccgggcagccaatctcatggaagaaggacactacgatgaagcgcaacgtagcttcgacagcgcctttgccacccggaacgtaaagcactccttcatgtatcccatcttgctgaacgaacaagccacactgctggtctatgtgggaaagacagaagaagcctttgccatgaaaaaaaatgtgctcccctacctgccgcagataaatgatttggaaaagcacatcagcgtatacaacgatttgggactcctctaccgtcagcaccaaatgaatgactctacactctactattacaataaagcactggacagtgccttgcaatatggggacgaaagctggatagcccacatctgcaacaatgtgtccatcctatacttcaatatcaggcagctggacgaagctgaaaagtataccgacatggccaccgaacatgccgccagaaccgaagacccattcgtagctttcaccacctggcaaatcagagcaaccataaaggctgaactgaacaagctggatgatgctgaaaaatccaacctcaaagcctggaacattgcctgccacggagagggaaacgaagacttatggaagatacgctgcctgcccggcatgctgagactctttgaacgaaaagaacaacccgattccatagaccactacttgaaattggggaacaaactagtacaacgggtaccatccaactccatcgctgccataggattcatacaatcgagggcagccaccgaaacaaaccgcaaaaactatgcccgcgccttgaaggacttccactggctgcgtaaccggaaaaccggtaccgagcccaaaacattatttacacaaatggcacgatgctacgatgccttgggaaaccccaaactggcctacacctatatggatagtgcccgcatgtggactgatacgctggcacagcacaatctgacgcaacaaatggcagaattcaacgtgaaatatcacacacaagaaaaggaattggagatagcccacctgcaacaagaacaactggaacaccaagccttcctgctaaaagcctccattgctgtagcccttctgtccggtcttgctctcattactttgttgacgctccgccacaagaaacgaatggccgaaaagaagattgaactgctaaagcaagaaaacgaactgaactcggcacgccgctacattgaagggttggaagaggaatgcaaatattttgccaaagaactgcatgacggcatagccaacgacctgctggggctgcaaatgaagatagaagcttctgccggcaaagggaatgagcaggaactggcctcactcgtcagcaaactgagaaacaacgtgcggaatatctcacacgaactgatgcctcccgaattcgagcatctcagtctagaccagatactcgaccgttatgctgccaaactgaccgagaacaccggcatagaggtcagctatcatccaacggagaacaacgcatcacgccatcttcccaatgaaaccgcttatgagctgtaccgcatcgtacaagagctcaccatgaacatcgtgaaacatgcctcagccagtcatatagtcatcagtctccgtgccgacaatgaaaataaatataccctgcaaattacagacaacggtaagaatgcaaacaagcaacaaacagcaacaaacaacaatgacggcataggattgcgtaccgtaaacgaccgtatcagagccatcaacgctaccgccaatgtatgctcgtcaacagaaaacaacgttttcaccctactgcttaacataaacgaatgaaaccaaacaaagaaacatacagaatactggtaatagatgaccacccgattgttgctgaaggcatcatcgcattggcctcgcaactcgaaggagtgacgtgcaaaggagccacttgtgcaaaagacgtggaacaactgaccctcaaagagagattcgacctttgcatcattgaccttgaactaccggatatgaatggattccaactcatatcccaccttcacagccagatacccgaatgcggcattttaatctataccatgcatgaagaaccttggatcatagccaaattatccaccctaaacatcaacggagctgtttcaaaaaatgccagcaccagcgaattgagagacgccatcagtacactgaaaaacggaaccagatacttcagcaatgttttcagcgaactggacaaggaaaaacaaaacaccctaccacatgcacttcccgaattgtcgagacgtgaaaaagaagtgctcgcctatctctcgcaaggactgagcacctctgaaatatcccaattactatttctcagcatcaatacaatacagacttaccggaagcgcctgatggaaaaactggaggccaaaaacgttgcagaacttgtctacaaggggaagagcttattctgagaacacttgtcattcgcccggacagttacaagcctccagcttctcaagcttctccgtctgaaaaggaagaaaatcaacttagcggatactcaccgtcatcggattgcgcaccttctgtgcaaaatcagccatgtatcggttccaggcttcagcagtcttgatgtccgcgcggtcccaggcaaagccccagtaatacacgtagtcagcgcccggctcatagtcgctgacaaccagtacatgaccgtccgcattgttacgcatcttcttctcctctatggggaaaagcacggttttggcttccttcacaacggcagggaaagcggcccccataaatatcttgccattatccggtccggtagtggggtctacatacgtcatataaccaccggcggcatcagccaccacagcaccgtccggttcgtgcagcacaataccggtaacaatgggcaaagattcctttagattactatacgaaacggcagtacggttcagatgagaaccggcatccagcgtaatcagacgtgtttccaccaccgcagtatcccctttcacagccaacggattgaactccagcttcacggtgaagcgcaacggaccgttgtccagcacctcctgcgtcttgtagcaccacggatagataatggtatcattcaccatcaatgcagacactccagctcccaatgttggacctactgcatagcagtccatgccataaccgtggtctatatgataggagaatgtgcgtaccagctcatcggctgccttcgggtctgtcttgcgcaattcattaacctgcttccaggagtctgcatccagttccttggcatacatgtcttccagtaccggtgcagcagtgcctcgcttcgtgaacaagtcgtagccgaaaccgcgttcaccccttgcctgcaatgcaggaccgtaggcacggaagcctaccaagtcgttctcccaggccatgtcgtccagacgttcgggatactgccgcccacaagcccttacctccacatcgacgggagtaccggcctggacggtatatgcagccgatgcattggcagctaccgtcgcagggaagattaatttgtcatcgtaggtcacttggtaaggcacctgctccccttcgacattcagaaccacaatctgtgcggtgtctgccagattcagaaggtttgagatttcggtcatggacacctctaccatctcatcggaacggtccatcgctaacggattggttaccgtaacagtcactatcttgctatcgttgcaagcaagacagcagagggccgccatacataataaaagaaagtttctcatataatcattgctttttcctaatcagttgtataactttcttttaggcgcggatttcgcggattatacggattttccttatcctttccgcgaaatccgcgtaatccgcgcccaaaagaaaaaggtgacaagtgacattatcctgccactttatcaccttctcaattatccttaaatttatttcggttgctttccgatataagccaagatacctccgtctacatagaggatgtgaccgtttaccgcattagaggcttccgatgccaggaacactgccggaccggtaagttcttccggagccagccagcggcctgccggagtcttggcgcagatgaacgagtcgaacgggtgacggctaccgtcggcctgcttttcacgcagcggagcagtctgcggggtagcgatgtaacccggaccgataccgttacattggatgttatattcaccatattcagagcagatgttgcgagtcagcatcttcaagccacccttggcagcagcataggccgacacagtctcacgacccagttcggacatcatagagcagatattgataattttaccgtggcccttcttcatcatggcaggcagaacagcctttgatacgatgaacggagcattgaggtcgatatcgattacacgacggaagtcagcagcctccatctcgtgcataggaacacggcggatgatgccggcattgtttacgaggatatcaacagagcctacttccttttcaatctgggctaccatggcctgaacagcaggttcatctgtcacatcacatacataaccgcgtgccttgatacccttttcagtataggcagccaagcctttgtctaccaactcctggttgatatcgttgaaacagatagttgctccttgctctgcaaaagctgaagcgatagcaaaaccgataccataagaagcacctgtaacaagggctactttaccttccaaagaaaaattcaaatacggattcataacgttaaattattaagtttaaataagtgatattctatttatgtacgatttgcaagtagtttatactcaatggaaactttattttgggagaatgccttccctataaggaaatcgcagcgaatgcttttcgtatcgtagcttttcacatcatcgggatgctcagcatagcgaatttcatagttcgttttcatgattgcactacatttaataggttataacttcagccatcaaatacacatcgtttgcgtacacgatgcaaatgtaacaaaagaaaatggagaaaccgtataaatttgtgtcaattatatagcaatatcgttcaaagattcgtaaaaagaaaaaatctatacctatagtgccaacaagagggggaaagaataacaaaaaaacccactaaaacttgcgattttagtgggtttttagctgcaattagctgcatcgtagttggactaccaggattcgaacctggacaaacagaaccaaaacctgttgtgctaccattacaccatagtccaaacatagggctttctgttaaaaagcggtgcaaagataaaaggaagccccgaaatatccaaatatttcggggctatttttactgccgaagcattatttccttaattacttctctttaggataccgctatttggcgataatcagatagtaattcttcttgccgcgctgtaccagcaggtatttttcgtccagcaggtcggctgtcgtaatcacctggtcgaaagcagccagtttctccttattcagagaaacgccaccgccttgcaccagcttacgcatctcgcccttggaagcgaatacagcagcattatccacgaacaaatccaccgccttcacaccggcagccagtgcatcacgggatatttcgaactggggaacaccctcgaacacagccagcagcgtatcttcgtccaacttcttcagtgcatcagaagttgcattgccaaacaagatgttggatgcatccacagcagcattatagtcctcttcggagtgaaccatgatagtcacttccttggccagacacttctgaaggacgcgcaaatggggagcagcctcgtgctcggccgttagagcgtcaatctcctccttggacagtgcagtgaatatctttatgtagcgtttggcatcctcgtcgctcacgttcagccagaactggtagaacttatatggagaagtgtagcgcgggtcgagccagatgtttccggactctgtcttgccgaacttgccaccgtcggccttcgtaatcagcgggctggtcagtgcaaacacctccccgccgttcgtacggcgaatcagctcggcaccggtagtgatgttaccccactgatcgctgccacccatctggagcttgcagcctttggtttcatacagatgaaggaagtcgtatccctgcaacagttggtaggtgaattccgtgaaggaaagaccgtcacgtgcctcaccgttcagacgcttctttacagaatctttcgccatcatatagttcacggtgatgtgcttacccacttcacgggcaaaatcgaggaaagtgaagttcttcatccaatcgtagttgttcaccaactcggcacggttgggggcatccgaatcaaaatccaggaacttggagagctgggccttcataccggccagattgcgctgcaacgtctcttccgtaagcagattgcgttctgcagactttccggaagggtcaccaatcatacccgtagcaccgccaatcagtgccaacggcttgtgtccgcaacgctggaagtgacgcaaaatcatcacactgcaaaggtgcccgatgtgcaaagagtccgcagtagggtcgaaaccaatgtatgcagtcacttgttccttagccagaagttcttccgtacccggcatcatatcgtggagcatgccacgccatcttaattcttctacaaaattcatcgaatgattaagttatctgattaattatttaagtgattatctatgaattgtttgattcctattttaatctgcgcaaaaatacgactctttattcgaagaaacaactcttagggtttaaaaaagactttgcagacatttctccggagtgtttctccaagctcctcgggagagatgccgcgcacttcggcagcgcgtgcatacaattccccgatggaaacttcactttcatccgtttcgatgaacagccggtcggcaggtacccggcacaaggctgcttcctggtatttctccccgaatgaaagataaaagccatgtttcagatattcctccgccagcgccgccttgccacggaaaccatgtattatccacggattcgacgggcgcaagtcccgcttcaccttcagcagttcatcaaccgccttcaccagatgaatcaccagcggctttcccacttcctctgccaaacatgcctggtgtctgaacacttccacctgcaaatccatcggagcatctgccagcttgtccagcccggcttcgcccacggcaagtacttggggatgacgcactaactcctccaggccgcacaccctgctagccacagcaccttcaactccagagtgttcacctccactccgacctatatgccagggatgtatccccaccgaataccatccgccgctctgtggagagaacgtttcgggatagcaatttgcaatggcagttccgggtacttgcggaaaccggtgtgtatgtatgtctactggaatattcatggaacgggatcatatccggaacctccccagggatggcagcgcagaatgcgccttactgccagacaaaaccccttgaaaggtccgtgtttcttgatggcctccaccgcatattgcgaacaagtgggggtaaaacggcatgaaggccctatcatgggcgatatgcacttctgatagaaatagatgggaagcagcagcagatatgaaagcagacgcttcatgacacctgcggagtttgctcggcttcagcatttgccgctaccttctcggcaatgcgtgccaaagctgtcttcatacggtcctcaatgacagaagagtctaccaactggtccgaaagatagataaaggccacggccagacggcactttttttccgtcagcacggccagcagtccgtgtttgttcatgcggtaggcttcacgtatctggcgtttcacgcggttgcgcttcaccgcccgcttgaaacggcgtttcgaaacacttacaagaatggaaacgggtgcctccagctcctccaccggcagatacaccacacgcaaagggaaaaccgaaaacgagcgtgagccgcccgcaaacatcttctctatcactttcttcttgtccaaccgttcggacttacgcaaggtatttggcatgagaaacaaggattagggattagggattagggataaaggattagggataaagaataaaggaggtggaggtgaataggttctttcatcctttatccttaatccctaatccttatttctctctttatttctctctttttactttcctttattattctccttgataaacatgtcaagcgccgccgtcattgagggtgcctgcacgctgggagcttccaggtcaagacgaagtccggcatcacggactgcctgggcagtggtagagccgaatgttccgatcttgatttccttctggtcaaaatcagggaaattcttcttcaaggcactgatgcctgccggactgaagaacaccagcatgtcataatcaaaagcctcatctgcagcaaagtcattgctgacagtacggtacatgacagcttccgtgtgctgaatcttattcttatccagcagattcttcacgtcatcattgtgtacatccgacattggtaccaagtacttttcagtcttatgcttaacaatggaaggtatcaaatcgtcaatcttcccggtgtttccgaagaaaatcttacgcttacgatactgcacatacttttggatatacagagcaacggcctccgtcacgcagaaatacttcattgtttcgggaattgtcacacgcaattctgtacacaagtggaagaaatgatcaatagcatgacgcgaagtaaaaataacggcagtatgatccaagaccgaaattttctgttgtctgaactctttcgctgaaaggctctccactttgataaatgggcgaaaatctattttcacaccatacttctcggcgatgtcgtagtaaggagatttctctgatgccggtttcggctgcgacacaagtactttcttaattttcaacgtcctaaaattttattatcaaataactgtttagctgcatcacaccttgatataacacaaaacaaggcatgatttcaagggcacaaaagtacaaaattaaaagtaaaccgccatataaattgttacaaaaaagctttaaccacttgtataacatcaatattttagcaaaaaaggctaaaatcaatccgattattatcgtcagctgcaaactcaaatcaaaatagactatgaacagagcaaacgggaaaagggcgaatcccaagtaataaagtagcgtagaataggactcaagccatagcgttgtaacactttcgtcaaaaaaaatccaacccagaaaagagtaaagcatccacttcaagcacaaatagagaagacacataccgatgtaaatccccaatagaagtcccggcggcacatggtgtaccagttccggctgtatatcattgaagtagttgaagatacagacgcctgctaggatgcaggtctgcaggatgagcagcagcagatagcgcatatcggcggctgtggaagtggcaaatatgctggtacgttcgcgatgaagcaggaaatccttcaccagttgcagcaggaacttgcggctgcgtgacaagacataggccgacagaaagaaacagcacaaaaggaccacggtgatgccatcgtccattctcggagaatatggaataggaatcccctccgtccccactactgcccaagccatcaacagccctatcatattgcagcgaatttacggatggaggcgtcccacaagggagtggtatatatcagttccacggcttcctgcggtgtctgcgccacatgccagatggcaccgtgctgcacgcgcatgaagttttcgtccaccgcctgccggagcatatcgagcagagggtcgaaatagttcttgacattcagtatcacaatcgggttcagatacagtccgagttgcttccaagtgatgatttccagcagttcttccagggtgccgcaaccaccgggcagggcgatgacggcatcgctcaagtcggccattgtctttttccgttcgtgcatgctttccacttccacgagttgggtaagtccggtgtgatgccatccctgctccaccatgaagcggggaatgacgcccgtcacctctccccctgcccggagtgccgcatcggacacagcggacatcagtcccatatttcccgcaccattaatcaagcgaatttgccgctgccccagcagagtgcccaactcacgggctgcatcgaaataaacggaatctatctttgtgctcgaagcacaatatacgcatacggaatttatcttgttcatcatcttgccacacccttttttaggtatcgccacaaaggtacatgatttcggggagatttgaaacaagagagtcttatttccaaagttcttccggatttgtggtgcggacgctgttctcgaacagccattgggtgccaccgctccgaacggtaaatccgacgggaataggtgcaagtctccggtcacccggcaaggggtcgcctgtttcatcgtccatgcggctcagttcatgcatgctgtaccaatagttatttttggccatatacgtgtcatagtattgcccttcatttgcttttctgtttatagccttacacagaccgttcgataggaaaaaatacgaaaaagctcttccttctcactcatatctgtcaattttccataaatttgcaatggacctaaaacatcatgatgtgaaatacaaacgttggatttacttaaccgtcactttcgtcatcatattggcaggacttgcttcccggaaatatggcaatgcattgcctaaatttattgcagagtatattggcgatacactttgggcagctatggtctattggggattacgctttctcttcccttcggcatccatactcaaagtggccgcaatctccttactgttttcttattgcatagaaatcagccaattataccaggtcgattgggcgaatgccatacgaaacaccacgctcggagcattggtcttcgggcatggatttttatggtcggatatgatatgttatactgtcggggtaatgttatctgccaccgtagattcttgcgcttccttttcttcttcggatgaagcagtataaaaacaagacgcggacaaaggaacacagattctatgcaagccgctattatccccgccaaaagcattcgtaggacacatttcacgaggctacaccttttactccggatggctacaccctttctatgcgatggtatagccatctgcaaaaaagggtgtagcccggcacggaggatagttacaacattagaaatggtatgactgttatatgacaaaaaaatatcctaacatgcaagatatgggatatctgatgttaggataacgataaaaatagtcaattcatatcaaggcaagacggcctaattatcaatacaaaagagactgcgtttgtttatgataaactgcatttttcttttgaagatttacggctattgacaagagaagctactaaataaaagatattaatgattacatagcatagaaaaaacttccacactttaatcgtttcttttagccactcctcaacccataagatatcaatcttatccccacatcgattttcaatctcatatttataactaatttcacaattaataattgcgtatataattaataatgaaagaattattaatgtggcaacaaacacaattctaagccatttcataatctatcttgttttataaactacacctcctggtttggatattctcactaaatgattctgcattgatattggaagaacaaatctgttgacaataggaatagtagtccatgttcccaaattacttgtttgttgtagccttgtccctttcagagcatttgacccacttttattcaacacgtcagataccattgttgtacaattattacttgtcagcttatattcatcaataatacgagcagaagaactgttataataatcacttttaggattatctggcattgtagttgacatattaattaaacttttcgtctaaaatattagcaactttttcatctgccacatctgttactacaaatacagacattccaccagctgctttttttgtcattgtaagcttttgcttcatcccccattaactttaaaagaacaccggaaccatttcctaaagaattagagcttctatctggccctttattagttccattgtatcgtccgtagctataaacagtcatattagatccttcaccaacactaatccatgtgtgaccaaaggactgagtttcagtgcaaattctaatactatctccattcacatcaatattaacaaccggactattcgccccgtactgatacggagacatcgaataatacttctcggcaaatctgtcattagtcgtaaaccttcctaacgccgtatcataatgtctcgccccataatcataccaattcaaacccttcttcgtatcaaactccttaccgttatacttgtaaggctgggtattgcctgcagtggcaaatacaccaccgaaagggtagtaatggttagtttcctccacagtgccagactggttgatcactacacggttgttaccctaatagtccttcagatagtaatgatactgctgggtaccggccaggttgatgtaaccctcttctgtgagtaacaacttctgagtaccgttttcatagatcacattaccgcaatagtcagtcgttgtggttgtactgcctatcttatggactgttctcagtttcgtgccgtcagcaccataagtataggtaatcgtgctaccatcactgaacgataccgtactgggcaaatttaatacattatattgaatatcggcaattcccttattcaaatctttcgttaaattaccattgacatcgtaggcatactcccctgcggcgcttgcaccgttcacaaaggcagtgtttgtaccgtatgcagcggtactcaccgcatcctccacacagctcaactgattaccggtcaatgtgtaagtcaggttatcaagcaggccgtaggcactggcaccagtctggccataacgttgcaaactcttgatgttaccgttcttgtcataacccgtaacgttctccgagaagcggttcgcattcgtgctgatacttgctgtctcgccataggtagcgttcagcatccggtcaagaccgtcataagtgaatttgtaaccacggactgtactttcgttcccggacttccaggtcatgctgctgatgctgccgttgtacttcgcagtacccacacccgtgttgtagtacaggttctgcgtgaagcgtgtgccgctgattcccgtcagccagctacgcaggttgtaggtataagtcagcttgttggtgctcgtaccgtgatactgcttggtcagtaaacgaccgaagttgtcataagtcgcatcgtacagagtaatcgcagtgctgccaagactatgctgcactttgcttattctgtccgcatggtcgtaggtataggtatatacttccgtgcgcgtggtctttccgctggcagtatgtgtatgtgtcacaccagacggcttgttggagaaagtataaaccgtacttgtgatgtcgtagccactgagcaagttgttctgcacaagcacggtaggactggaagaaggattcccccctgcagggtcagccgtcccagactgtcgtacaaataatacatataggaaatgttatccagataggaagtgcccgtgctgttaagcatccggagagtacggatgtagtcctgcatgacctacatcatttgatagacctaaaaaactatcctaacatacaagatatagcatatctgatgttaggatagtaattaaataaatctcattgaaaaaaggcaacttatattagagtaatattttttatttagtatgcaaaagctttataatctcaccattactttttcttatttccacataagattgtccacagaaagtcagcgcactatcatttccattaggaatatgcccttctattacccatattccatttaccaagttaacagaaaaaggtttttctttctctatactttcctttccataaatttccaatagtacgcattccgctatctttactgcaatatccgctgtaggtataaatccctctgcaggaacatagcttttcatatcagtataaaaatctgttgagagactatcattcattacatactcaatctgttgagatgattgttgatcttctccgaccttcgatgtactgtttgtacatgacatcgcaaatagcattaaagcaaaaaaataagtcctatacatattgctatctttttaaaatacccaatgaatatgttctctctggctaacaggaatgtttaaatctggcttttgtagcaattctttcattctttgtttacccttttcagcaggaatatctttcggattaatattattctttcgtttaggatctttgggatcactaggaagatcactagtcactattgatgttttcttactataaggattatattctaacaaatcgccactcggcgtagccaaataaccattttcttttgttttctcaatatattttatatcagcttttgagaatttattatttatatgctctgcgtccgcgtctccatgcgaatgaatcgatcctacaaatctctcaccgttaggaggtaagcttatagatacgctgtgctctccttcattggctgcactataagaatatccctttagctttcccttttgcttaacttcataaatagaagagcccatttcacgtttacgtataatagatgcaccattataatacataccccaatctttagcgagggcactgaaaaaggctctctaaaggcaataaaatgaaaggttcgccaagtccatataattggatttggcgaacttatttttctacttttgaatctaagaatttagcggttacttgccctgtaaagcttaaaaacggccaattaagggctttttagagaacgaaaaggctctcccctcatctgagtttgaggattctcttgatatttgctacaaagataaccatagccccttgcatacgcatacattctattccgtatgaccatgctcggtcataccctaatacattttttaattcggagttcttggcctctatcttatatctcacttttgctttactcctgaactcttccgatttctcaaacgcctcatgctgctgatgctctgatgattttatttgaacagaatatgttttagattttgcgccttctttgtagcatccctctcgccttgaacataacttgcatttatctacatcaaagaaatagaccattgactgattcgttccctgtcctttctttccttgtacagcgcgcctaattgccatatggccagccgggcaaacaaacatgccagcgtctttattgaaatcaaatttatcctcatccttacggaatccattgcttatggctggatttaatcttgcaactagctcaaaaccattctcttcattgttcgataatatgatgttgtctttacctgaataagctgtgtctccaacgactgtttccaccgtcattccgttggcacggctctggtttaccagctcttcaagttgtgggccatcacccttctctcccgaagtcactgtggcggcagtgattatacgctcatcgctcatggcaatatgtgtcttgtagccgaaaaacgagtcatcctcgctcttgtgacccacccgtgcatcttcatcttttgatgtcatataatggtcttcaatatcggcaagtacctccttgagcatattcagccgctctttgaccttgggtatctctgccaatgagggatttgagctaactacatcaagcaatgcctttgtatagtcaagctcatgctcaatgttgtcatccgtgttcttcgaaggcagattgctcttttcggtctcgtcggcatcatatatgcttttgcgcaattgcttcgagcgcaatcttagactctccaagggtgaccaaggattgctgcgtgagccggtatgggtggcatcaactataatcgtgcgagactttattatgcccttttctatagctatgccaacagtcttgccaatcagcaaatccagtagatctttatcttttagacgcaacttgcgaaacttgcataatgagctcggattaatcaaatctgtttcctccggactcatcccaagaaagtatttgaaagacatatcatatcttgatcgttccacaacatcgacatcggatatgtcatagattgttttcaacagaagatatttgaacatccggatgggacattcggccatccttccattgtcttgacaatacttgtcaacgagttcttttttaataaaagaaaagtctatcaaatcatttatctgacgcaataggttgttacgaggaataatcaaatcgtatagatccgaataattactgaactgtatagtctgttgtagtggtagcatatctgtctgattactaccataaagttacaaaaaaatcggcacatactcaagcttttgcctgaatatgtgccgatttttttaggacgctactatatgggggactttttcagtgccctctctttagctgctgctcttttagtcttaaacagatcaccaggagcatattccataccatttgggtctatgaactttaccggattatcggcacaataagtatacggactcatcgaataatatttctccgccaacgggtcattcgtcgtaaaccttcccaacgcagcatcataatgtctcgccccataatcataccagttcaaacccttcttcgtatcaagctccttaccgttatacttgtaaggctgggtattgcctgcagtgccaaacacaccaccgaaagggtagtaatggttcgtttcctccacagtacctgactggttgattactacacggttgttaccttgatggtccttcagatagtaatgatactgctgggtaccggtcaggttgatgtaaccctcttcggtgagcaacaacttctgagtaccgttttcatagatcacattaccgcagtagtcagtcgttgtggttgtactacctatcttatggactgttctcagtttcgtgccgtcagcaccataagtataggtgattgtgctaccatcactgaacgataccgtactgggcaaatttaatacattatattgaatatcggtaattcccttattcaaatcttttgttaaattaccattggcatcgtaggcatactcccctgcgacgcttgcaccgttcacaaaggcagtgtttgtaccgtatgcagcggtactcaccgcatcctccacacagctcaactgattgccgttcagggtgagagtcaggttgtctatcaggccgtaggaggttgaagagagttgcccgtaacgctgcaatcccttgatattgccgttcttgtcataccccgtaacgttctccgagaagcggttcgcattcgtgctgatacttgctgtctcgccataggtagcgttcagtactctgtcaagaccgtcataagtgaatttgtaaccgcggactgtactttcgttcccggacttccaggtcatgctgctgatgctgccgttgtacttcactactccgtttccggtgttataatacagattctgcgtgaacttgcttccgctgacccccgtcagccagccgcggatgttgtaagtataggtctgcttgtttacggcactgccatgcagcgacttcgactgtagacgccccaggtcgtcatagacattgttcacgagcgtaacctctcccaaagcatccaacttgtgcttcaccgtcaacaacctgcctgcatggtcataggagtatgtacggacttccgtacgggcagccttgccttgggcagtatgaacatggcgcaacctggtaggctggccggtaaagttataggccgtgtattccgtttccttgcctcccagggaattggaactttgccgttggacgggccgtgaacggcggtcataatacaccacactgtaaagctgtccggcgccgtccccggccaagcccgtcacgctgcccgtaagcattccccgggcatcggatttggtgccgtatccggaggactccatggaactgtcgtaggcataggcggggaaaccgttcttgccaagaaagtcatagttgtcgtagtagttcactgtgagcagcctgcttcccgaaagtgcacggacggttccacccactttcacggcatatcccttatagcttccgctgcccgtgaattccgcttccaccgcacttccgtccaccggcaggggctcggagcagaggccggaaagcactgtacggcccaaagcgtcgggaatggtgaagcgccatctgccttgtcccttcaagttgccgtcctgcacgaaaatcagacggtcggccttgtcgtagacatagcgcacggcatcacatccgggcagcttcctccacacgcagcggtcgcggctgtcgtactgatagcaataggccagtgcatcctttcctgtgagatttcctcgtcccgcaggcgcgagggaaggacgaaacggagattgtcccggttgtcgtagacatagtaggtgtcgtggttgtcgcttccgatgacccggcgctgcaataccatacgtcccagcttgtcggtgaataggcaggaaacgttcctgtcctcgtccgtggtgcgcacaatgtaaagattgcccgaagagcagttccctgatttggaaagcgtggcgttcctacctgtcccgttcactttataggctatgcggttcaataaagctccgcccggaacgttcgtcaggtatgaaataaaattccctgcttatagagatggggcaatataagcagggaatcatttggcttatcgaagcaggagattctaatattcagaagcagcggatgaagaacatccgctgcgacaaaaaatcagtacaaagatagctcaattggtatttggtattttaatctcatatccaaatactcttgccaactcaaaggtcccaatacaacatcgtttgtttttaaaattatccaatagaataaactatcgtttgttccatattcatattttcttttgtataaaggttcttgaggatatttaggcttctgttttgcaataatatattcatcgttatagatatagtcaagtacagttgacggtatttctccaccattggaattttgacaaagaatatcttttatattctctccttcatctctataaaaatatccatttcctaagttcttaatagaatcagaaatgcaactttgaataaataaactacaaagcaaatgtagaacaatacatccctttttcatatctcttcatattattttatccaaggtaaaaatggtgtcagtttagcacttccataaatatttatttcatatggttgtccccttcctgcaaccctatttcctataatagtttctatatttcttccccaattcaatggattccgaccattgtgcatttcaaaatcatatttatcagaaaaagctcttactgaatgattcggatatcgttttaaagtaacgtttccgtatactaatccatcatttaaggagccactatgcaacaataaattaaaactttttatttctctcacatatttttctcctaaagagtatatccctgataaatctatttttgctaaagatgtgaatagtggttgtcctttcccttccctataccatttattagcttcctccaaggtcaaatatccatcataatccggtctgtctttaagacttgtataactctccaagtagttagagcgcgcttcttcatctgccaatccattataccctaaactatggcttagtgcctcttcatgagacatgccttgtttaaagtttgacttgttcataataatggcctctccttgcagaccttcatcatctgtaccaatcaacttaccttcttcgtcataaatcggacttatggacatacctgtcggatcaatatagcgtacggaattattactacaacatgcatacatccctatcgaataatacttctccgccagagggtcaacagtcgtaaaccgtcccagtaccgcatcataatgccttgctccatagtcataccaattcagtcctttcttcgtgtcatattccttgccgttatacttataaggctggacattcgtagtacttgcaaatacccctccgaagggatagtaatggttcgtttcctctacagtgcctgactggttgacaactacccggttgttcccctgatggtctttcagatagtagtgatactgctgagttccggtcaggttgacatagccctcttcggtaagaagcatcttctgcactccgttttcatagaccacatttccgcagtaatcggtagtggtggtagcgctgcctatcttatggactgttcttagctttgtgccgtcagctccataagtataggtaattgtacttccgtcactgaaggttactgcattcggcaaatttaaacaattatacgatattccggtgattcccttgtttaaatctttagttaaattgccgttcgcatcgtaggcgtactcgttcgcctgcttcacgccgtccttgaactcgaagcctccaccgtaagtggaagccgtcaccgcatcatccacgcggttcaaccgattgcccttcagcgtaaaagtcaggttgtctatcaggccgtaggcagaagctccggtctgcccgtaacgttgcaatcccttgatgttaccgttcttgtcatagcccgtcacattctcgctgaaacggttggcattcgtattgatgcctgccgtttccccataaatagcattcagcatcctatccagaccgtcgtaggtgaacttatagccgcggacggtgctttcattgcctgccttccaagtcatgctgctgatgctgccgttgtacttcgctactccgtttccggtgttataatacagattctgcgtgaacttgcttccgctgacccccgtcagccagttgcggatgttgtaagcataggtctgcttgttgacggcactgccatgcagcgacttcgactgtagacgccccaggtcgtcatagacattgttcacgagcgtaacctctcccaaagcatccagcttgtgcttcaccgtcaataaccggcctgcatggtcataggaatatgtacggacctccgtacggacagccttgccttgggcagtatgaacatggcgcaacctggtaggctggccggtaaagttataggccgtgtattccgtttccttgcctcccagggaattggaaccttgccgctggacgggccgtgaacggcggtcataatacaccacactgtaaagctgtccggcgccgtccccggccaagcccgtcacgctgcccgtaagcattccccgggcatcggatttggtgccgtatccggaggactccatggaactgtcgtaggcataggcaggaaaaccgttcttgccaagaaagtcatagttgtcgtagtagttcacagtgagcagcctgcttccggaaagttcacggacggttccacccactttcacggcatatcccttataacttccgctgcccgtgaactccgcttctaccggacttccgaccaccggcagggtgtccgagcagagcccggaaagcactgtacggcccagagcgtcgggaatggtgaagcgccatctgccttgtcccttcaggttgccgtcctgcacgaaaatcagacggtcggccttgtcgtagacatagcgcacggcatcacagccgggcagcttcctccacacgcaccggtcacggctgtcgtaccgatagcaataggccagtgcatccagcttgtcttgtgagattccctcgtcccggatgcgcgggggaaggacgaagcggagattgccccggttgtcgtagacgtagtaggtgtcgtggttgtcgcttccaatgacccagcgctgcaataccatacgtcccagcttgtcggtaaacaggtaggaaacgttcccgtcctcgtccgtggtgcataccacactgagctctcccgaagcatagctgccggattgcaccaatgcagtgccgctcccgacaccccctaccttgtagcggatgcagtcaagccggttgtcgcccgtcctgttggtcaggtagcttgtctgcacacgcttccggttgtcgtgccacagctggccggcaccatactcctcacagacgcgtcggtgtatgggttcctcataggaagacatgccataaggagcggtgtcgccgtagttcgtccgtgcctgtgccgtgacagaggagggggcggtatatgccccgcccgcactgaaagccaccggcagccagtgcttttccggcacatcaagggaagcgtactcctgcatgcttatcagatcctttcccgcaggcgaagtgcggtattccacctgctgcgccgggcgtcccaatccatccatgtaacagatggaaacctgcacgttgccgctttcgtaattgctgattgtcccgttgttgcaagccacggaggaaaccccgttgcggggagtgagcgtagccacataattcttgtccttgctgaacgagaccgttgccggaccggagctttgagactgcatttccaaagagatgcccaaagcgaatatcaatagtatatatcttaaaatcttattcatagccatgttgttttagggattgacataattatattcataggattgaagcacttttctggacagtccttccagcatccagacttctgacaggcggccgaagttgtcgtatccgtagtaagtggttgttcctgccggagaagtttctgtcagcaaccccacctggggtttataggtataggtggtgacatgcgccttgcccaatttcgtcctcagtccgtctatcagtgccgtatcgggactggaagaggaggacagtgattcgggagcggtgcccagggctgcctttacctcttcatacgtggcattcacgatttttgccaccgggtacatgccttggtagctccataggaaaaccatgtttccggttccatcggcagagacatacagaggattgccgtagctgtcgtatttgtggcgctggctggcagacaataccacctcttgtacgcggtacatcaaatcttttttataggggtcttgttcaaaatcatttgtcttgtatacattcgattcataggtgaattccgccgttccccccgtcggatatgtcacccacctcaactggaatgcttgtgcgaatgccggagtgggttcgcgatcggcactgcctccatgttccaaaatgaccgaatcagacttttgattgctgttacagcaataggcaggaatcagacttttgttggccgcaccattataatatccccaatgatcacgagcttccgacaacttggtgggtagagcggcttcgttgtaggaaaaggaatagacttccggtgaagccacattgcttgccgtatgtttgagtccggtcagtttcagtcttttggtattccagtctttcgtaaacatcttgttgttccatgtggagttgtaataagcgctgttaggcagcctgcgattcagttcgtcaagggtgggcacatcgaagccagtgttggcattggaaacaaaatatccctgaatcaactcccacttgctcagattgttgcccgcagcgtcgttgatgcgaacggccgacaagcgcacttccggactgtagtccaaccggtctgtggcatactcaaaactaatgctgccaccgggataactgattctatccagataggccaccttgtaataagccatatccgtggtgatatattgttccatccgactgtcctgaatattggcaaaagaagccaaatggaaatccctggttttatagccgaatgtaaccactgctccggccgttgtctttatccgcgtcaggtagaaagcactggaatagctttctgcacgcggacggtctgtgaaaaacgtctgttcagtctgttcaaaacggtattcagtgccatcgggggtggtcatgacccagccggccagtttgggatggcccatagcatcgttttccgtaagaggcgtaatccgcacattgtcttctctttccttcactatgtggcccgagtgagaaaatatgaactttcccgaatatcccaagaagtgatagtggaagacatcaggagccagttccgtaccgccacaactggcataagtatcgctcgtcaaagctctgtacagcatttcatgggtcataccttggggtagagcgaacggcaaggaagtgccggctccctgcgtaagataagtgtcgatatgatagatgcccgcaatgtcctggagctggttatccggggagtcattgaaataggcccactcgcagaagtcctgataacgtcctctcacggtatgggtcacaactccgccggcattcaatgtccagcccagccctacccgagtggcctcctcatttaccttgatgcccgaggcattgtaggaaagagagacgggaaaggaaaaatctttcaactggacggtatagagggggatggtaatatccggtacccctgtatagccggacaccggaaaatgtcctgccttcagcatgctttgtgcatgaggggaaggtggagtcacattagagataagaatattgtctgactgcgcaaacgtggcaattgcacaccataggcagcaaaataggatataaattgttcgcttcatgtttttttgtatttcctgatgagtaaaagtcttaagtttcgtaagtccaataattgactttcaacagaggacttgcgaaacttgaacgaatgctttctgttttttttcataaaactgccccacttggtagctttgtataccaagctgtaagcggggtagttgtcatccgggaaatcagagcggcatcgcctgcacccccagcacactggctatggtagcgatgatagtacccacaattttcaggatgtctttccaagtttctttacttattttcatgatgttctgtgtttttagacccctcgttcccctaaaggggaaggagaatactcccgccaatcctgcgcgcgctcaatcttcaggactatccccctcccccttcagggagtcctagggggggattaaagttctttactaacctcgaagcacgggcactgcttcacccactcccgtggctgcaccgttccgtccccgtccaaatccggactcaggtcgcggtggccgcagacacgggcattccggaactgcttcagcagctggtgtaccagcagccggagtgccgaacgctgctccggggtgcgggtatctttcggattccccatggcatccagtccaccctcgtagcagatgccgacggaatgcttgttgtggccgcagttccagagagcgggccccgagcacagtgccgtcgcgccggatatagtagtgatagcccgtcgtgcggaagccgcgacggcggtgctctgcctccaaagcttcgggagtgagcgcatggccctcccgcgtggcgctgcaatgcaccacgatgttgttgatttttcgcatgaatgatgaatagggattaagagttaatgattaagagatgtacgatttgacgatgtacgattgggattactcctcgtatcataaatgcctacacaggcgcggctatttagcagtactaactccaatcgtacatcgtcaaatcgtaaataattttatcccaaaggattttcgccctggtcgccgtcgttgccgcccgaacctgccgtgtcctgaaggtcgaagcgatggccatcgtgaagttctcaataaggaagaatatgatgatgtagagggcggcattatcaccggaaatttcgtaagaacactcctgacaagaactatttaacaagtaaatagagaaattatgcaaataaaaaacttgtaatttattcttttatcttatttttgcgatgccataggcataataataagtatccggaaaaaacatgcttattccatccaatagaacaaagagggagtgcattctttcaaggttatgttttctagtgctttcagtatgggtgtccctaccttccgcagcacagaacaatccctacaagatagacgatgcactctaccccatctaccaacgggcttccaggcaggcacgccagcaggaggggttgctggtggccgacaccttgtatcaacaagctctgaaactcggtgacaaaaaagcacaatgcctggcatacattatccctctgcagttctatatgtcccaaaaagacgacagcaagatagaaaaggcatccactgacctgaaagagatttcacgtgccaataactatctgcaatattattattacgcttggagcagcgaaataatttacttcctgaaccaacaacgctcattgctcgccttgcagaaagcggaaaaaatgaaaaagcaagcttttgccgacagatacccttacggtatcttcagctgtattcgaaccatgggccatatctacaaatcacgcggaaacttcgacctctccgcccaatactatcaggaagccttggactatatgctgaagaatatgcccgaccaggaccccagccaactatactcaagccttgccgaatattaccgtaacacccaaaaagattacgccaccgcactggactattgcgaaaaagccttgaagagcgccaaaacagaacggaacatagcccaagccatgatagagaaatgcctggtactattccgacaggggcgtatagatgaattcaacgactgctataaagaagccgtgcaaatggcggaccgttgcaagctctctgccaacgtttccctactgatagcccacatcagcaagaacatactggacaaacagtatgagcaggcccatgcccacgctgaccaattgtccgagaaaggcttgcaacaacatgcctacatttacgaatgcgccaaagactatcccaatgccatcaaatatctgaaaaaatattaccagcagttggattcgacaaacaatctgctgcaactgtcggacatcgccgaactgaacacccagataggcgccgaacgcctgaaaatagaaaacatacaggccacctcgcgctaccgcatcactcttttcagcattgtcaccggctttttactgttatctctgcttttcctaatgctctacctccaccgcaaacgtaaagtcaacctcgaactatgccacaagaacgaggaactttccgaagcgcgcgaccaagccgaagcagccaacaaggcaaagagcatcttcctgcagaacatgagtcacgaaatacggacaccgctcaactctatcgtgggcttctcacaactcatcacttcccccgacacgaacctttcccaagaggaaaggcaggatttctgccatctcatacagcacaattccgacctcctcctcacactggtggaggacatcctcagcgcagccgagttggaaagcaacagatacaccatgaagatagcgccgcacagttgcaacaaactctgccgggaagccataaccaccgttgaacaccgcacgcccgaaggcgtgaagctctactacacctccgaagtggacgactgctacgaactgagcaccgacgggcaacgtgtgtgccagatactcatcaacttccttaccaatgccgagaaacacaccacacaaggcgaaatccgcctgcactgctccctcacagagcatcccggatacgtcaccttctccgtcaccgataccggtaccggcattcccccggaatactcggaaaccatcttcgaacgctttgaaaaggccgacaacttcgagcaaggcaccggcctgggactcaatatctgccgcctcatcgccgaacgactgaaagggaaagtgctgctggacaaggagtacaaggagggggcaaggttcgtgtttgtactgccggtggaggaaaaaaataagagttatctcaaaacttgaaagaataggtcagcgaagggacgatgccataaagatacagtttatagatacgcccgtttcctacagaaaagtgcccctgcctccctgcataaatagagaacacatttttccggctataagtattgatgatggaaaggctcaagctacggtcttgcctgatacgccacgttgccgaaaagtccaactggtggaaagccggggcacgataaccattccggtcagaataaatatagaccagtacatgttccgattcatactttccaacgggaagcgtaagattcatccccgatgcataggagaaagtggaagacagagaccaatgtctgttcatttcccagtttacgaacaatttcaggttatggggacggtcgtacaccggtcggtactcctctcctcctatacggttacgcgcacgcgagagagtataactaatccatccggtcacggctcctttattctttgacaaatagaattccaatccacaccctctggcagaaccggtttcgacttcatcctctatccggtcgttctgaaaaatatcggcatttttcctataatctaccacatggtttgttcggcgcatatatgcctccagtgacaatgtatattccttatcagggaaattgtattcatatcccaatgccagttggcgcatgacggagggcttcaacagtgcattggcaggcatccacatgtccgaggggatacctactgaagaggtggtaagcatgtgtatgctctgtgccgcctgtgtatacgatgcggaaaaccggtgcgaggcattcggaataaaagagagttcggcacggggttcgggcatcacaaatgtcttggctgcataataggtagaggccggtgcatgcaatacggacagcctaaccccggcattcagaagaaaacggggcaggaatttataatttgcctcggcatacaatgccgcatcccacaaactcttgcgcgacatttccgaaggagtgatgttagaatccttaccggacttgcccacctcaccgggcatcgtagtgaaataatgcaggttcacccctcccttcaaggtcagcagattgttctgatacctctcccaatccgacttcaactgatacgactgcatgttcgacttccacacatatctcaatccgtccgacaacgatttgtacttataataatagttgctgaagacagcgcttgtattcacatttgtcttatcattcagtatatgattccaacgtatcgtagccgtagcatttccccaatccatcccatagcctttcaccagcttgttgaacacggtatggtcgcctccgctatacaaggaaaagaacatacgatttcgagcatccagcgttctgttcactttggcattgacatcataaaaccacatctgcggtttcgacgtcaggttacttcccaacagtccggctactacacccggatatccaaaccggccggaaaccagataagacccctctttcttcttcaaaggtccctccaacaacactttcgaggctatcagccccaagctggcactccgttcacgttccttgctgttaccttcgcgcatacgcacgtctatgacggatgaagaacgaccgccatacttcagcgggaagaacgatttgtacaagttcacctcacggatggcatcgttgttgaacaccgaaaagaaggacaatacatgactggggttataaactacagcctcatccagcaagaccagatttccccattggttactaccccgtacagaaatattgtttgtcccttcattgccactctgcactccgggcagaaactgcaatgacttcatcaaatccggttcccctcccacagatggcaatgcttgtatttcctttgcttccaaagcaaattgtccgctatgcttgcggcttcccactatctcgatacctttcagccaataatcatcgggagtcaatgcgatattcaccaccgtatttcctgataaagtcaaggtatctctccaagtaacataccccaacatggaacattgcaatatacattccctttcgggaagtgatatggaataaagtccgtaagcattggttgccatccccgttcccgaccttcgttccagcacattggcatccgaaagaatctcacccgttttggcatccgtcacacatcctcgtacaacggccttttgagcaaccactgcctgacaactcaaaaacaaaatacagaaataaatcagcaacagtttcattaattttatcttcttacgattacaaaaaagaacgcatcatctttcccccgttgcaatacctttttcggaaaccgcactcacacggaagcagccatacgccccgccgcttatattgctgcccaccgatgacggtgcaggtgtataagcgccaccatccgaccggaactggcgtatcatctggtcgaaaacgtcataacaactcttggatatggtctgagcccatacatatacagaatctcccatgggataatcccaacccggaggataacccagaggattttctccgtcgtcaatcagaaaatcaaccacattctcttcaagatactcatcgctcaagatagaatactcccaaaaggtattggagcccaacaaagagtgagggcgcgaaaaagaaaaatgcttgtaagtacgcgaatataaccggaacaaataatagttatctacctcagacggattagtgaaacttatacatggcgcccacctgcctcctttttcattaaagtcgaaatatttcagcttcaaatcagtaatgacaagtgcaggctccatcttctggacatcggactgataatgcttaccatcgtgataaatatccaattgataagaatgaccttctatgccataaattttggtagtgacatacatacccctgccagaaccattatcatacatgaggttcactctttcgcgagtattcttctttaaatgataatcataaaaatcataaaacactccaccgtaatcaccatacggataaagcacctgcatagtatctctgataccttcagtaaggtccgtaacaatcatcacagcatcttctataccctcataggcataatcttcagccgacatcaatgccggttccctcaaaagaaagaaataagggggattttcgtttgtaattactccattaaatacaattccctcaagcatagaatcggggatattgacatcaaacacttcctcacaacttgcaagcaggagagaaaggccggccagaaatgtaattataaggtatcttaccatcggcatcagagtttatctgttttgtaattcttggtctaagagtctagtcagttcctcatacgaatttgtgatgtatactagtctgtcattaatgataatggtaggagtggcaaaaagcccccgttccatcaacttattgatagcatggtttaccttatcataatttggagcagacaacaactcttgtttatatgcttctaagtctaaacccaaatttgtggctatattaaaaataaaagatgaatctaccaaagcttcgtgttcaaaaatagcatcgtggaactcccagaatttaccatacctggaagcagcctcgcacgataaggatgcaagggtaggctcatcagcaaaattgatgaatccaaactttacccgctccttgtatttatcataaatccgcctcaatgtcttttcaaaatcaacacaacgtttgcagtcaaagtcggaagcaacaatgaaagttgtagcagcattcagattgcccctatagcgcacgttcaaatcaccaacaacacatttgggctgtttaggaggataaaggtatcttttaacttgcgccttattatacaatgaatctgccaaatgctgaatgatagctgcacgaatatcattcttcacagaaatagttccttcaatactttctgaagaaatcttgtttaatctctcccttgaatggagaattcgctcatttacagaaccatacaccgcaagcaggctgtcttctttaatgctcatcaccttttctatatagtcattcaaaaaagtctcgaaagtttttcctgcaacggtggcttcttgctctatcaacttttgtttaatcaagtcttccaaagccttcatctttatctcataagccgtattaagcaaatcaaaagtctcttgggtagttaattgagacagctcggaagaataaactttatgtccattcacttctgccacaatgctcttgtcccagttggaacaagagcataaaagaagtaaacagcaaaatatttgatatttcatattattacggtcttggtataggggttccaaaattaggatggaatatattattcaatgcaaaacctttgtttgtgtttaataaaacataatatcttgtgttgtctgtagcattaattccatacatgccttggtcaccagacaatttatctttgtatgtatatcccttataggatttaagccagtttttattgctggaatcttcgtcatcaacataaatcatgcctaagtcctcaatagtataggcataagctaaaactccatacttaatagaatttcgaggaccaactccaggaatatagccccattgattgcgaggataaggagggtaagcccaggctaatgctgcattagaattcacgacagtataccctccaagctgatcaattctttggtattcaggatgtgtgctatcaattattttattatcagtatgcttatcatcacaatcatgataacgaacaagtatatccattgtaccaccaaactgactgtaatttatatggtcaacaagaaaaactcctccaggataatattgagttgcttccgtcaagcagaatttgaaacggacattgccattattatctacaaacgtatctcctacataaccttcaatcttagaattctgtcttgtatcttctgcatcaagataaagtgtcagttctttataagtcccacatgactctactttgaacacccctactacatcagtagttccagtgtaagcagttctcattactctttctttagcaacagactgtctattcattaattcctgctcgtactcatccatcaaagcctaaataacttgttcatcggctacagtctcaatttttgccgtatccccctcctcattaattgctctggttgatagctcataatcttcagcagctttagcaagctccgcatcattttccaacaaatcgtagctgttactgcatgagtaacaagccagcgcacctaaaaaggcgaacagcaaatgtttcttcattttttcttaaatataatgttagtaaataaaatccccgtataaaacggtatctccgatagtaatttctaagcgatactcttctccttcatttaataagcctgctaaatttagtattatctcaaaagtagagtatgaatcagaaaagatggtttcattagtaaaaaggttggtaactgaaaccttgacatcagcaaagccattctgagaagttatcataattgattctgaattagaatcgaataatgcagaagcctctaagatagcagaacgtgttcctttactatttgtagtagaagaagctacaattttttcaagatctatctttttcggtcgtttctgagacattgcatttatattcatacaagtaaatgcaaatagacacaatagtagttttcttgttctcattattaattaagttattaaaagtttaatactgcaaataacttaatcttttataagaaagcctacaaaaaagaggtaacagtggtaacagagcaatgtaacagaagtaacaaatccatcataatacgctatttatcaatagtcaaacatacgattgaacagttcttcatcaattttattcttgatacggctctttctcgtttttatagcgtccgaagagacatccagtatacataaaacaataaatttggaacaacggagcaaagacaatatacaataaagcaaatcatcattagtcaaaccgggatagtgttccttcaaatctttcatgacatcggcaaaagtctttcttatatcactcaccatcacttgcctataagtatctgcaatcgaaacctgcattttagcagttgctttcttcaattcatcaagttttctacttccctcggtggttctaaatatagaaacacagatactgaatcgttcctcctccaatttgtgtaattctgctactttcgtattagaagctgattcaggaatttcattcaaaagcatcacctccgcacggttttccatcaagcgctgctgcaaagccatatactcctttttcctacgggcatcacgccacagataaacaatgaccaatacaaacatgaataacaaaaaaagaaccgccaagcctgcaactatccgttgatttctgacagacaattcacgtttatgaagttctattaaatgattatccatcagttcatcaagttctgcacgataattcatcatttgaatggagtcatagaaaagaatgaaagagtcaacatatacagtagcattttcccaatccttcatttttttatatccttcaaacaaatgattataagacgatgtctttacatatatattagaagaccttgctccaattttccaataataaacagcagaatcattccgatttaaggaatttagaatatccccctttatagaacaagccgatgtataatcttcctcaacggtcaaatagggtaaagcttttgaaagagccgattccgcctccatataccgccccaactcattataaagccccgctatgtttttataaataagggataaacactcattgtcttgcagcgaggatgcaatttttaaagcttgttgatagtaacaaagcgcactatccaattgatattccaacaaaaaggtatttccaatatctcttaatgcataaaaagaacgtgcagaatccttcactgcacataaattatatcccttccgatacatttcccttgccgtagaatgtaaatcttgctcattataacagttccccaaatggctgtacagcatcgccacgaatatagagtctttctttggcatcagttccagcgacttcagatagaggcttatcgccttcggaaactctttattttccatatagacacatccccaatagaaatatgcttgcgccagccgttcctgctttccgcctccttcgtaatagtctaccgctatctgtatcagcgaatcgttctccagcagcacacaactcttgtatcgggcttgcgtcagcagcaacgcatacaaggcgcgttcttctccccgcaactcgcgggaatccggtatctgttccaacaccagcaaagcactgtcgggattgctccacatcatggaatctgctgccacgagcatggaacgtgcagaagtgacttcctccttgcacgactggcacagcacagaagttactaaaaagaaggaaaaagcaagcaaaaggtatctcataggcagccctatattcgttgttgttcacaaaggtacactatttagaggagattactgtacacattccatgcacattttgcaggtaagctacgaatgcaatggcaaaattgcttgtaaaataaggaaaagagagaagaagaatcgcttgttgataaaccaccatgcccccgtgacgagcaaaaacacgaaagccacctcttctgcatataccgatattccggagatgcagaagggcagccttctatataaatagccgtaaagctatgctgattataaaccgaatgcggctttcaccttgtccacatagtccagcttctcccaggtgaagagttccacttcaatgtccttgttgccttcgtagcggctcttgaagtgcttgacgatgatctgcggctcgcggcccatatgtccgtaggcagcagtctcctgatagatggggttgcgcagtttcagacggtcttctatcgccttggggcggaggtcgaacagctcgtcaatcttacgggcaatctcaccgtcgctcatattgacgtggctgcggccataagtatctacgaagatattaatggggcgtgccacaccgatagcgtaacttacctgtaccagcatttcgtcggcaacgccggcagccaccagattcttggcaatgtggcgggctgcataagctgcgctgcggtctaccttagaggggtcctttccggagaaagcgccgccgccgtgggcacccttgccgccgtaggtatctacgataatcttgcgtcccgtcagcccggtgtcaccgtgaggaccaccgattacgaacttgcccgtggggttgacgtggtatgtgatatggtcgttgaacagtgccagcaccttttcatgatggatggaggcaatgacacgcggcatcagaatctcgattacatcccggcggatttgggcgagcatttcctcgtcggccttcagctgggcggcatcactgtcgtcggcaggctggacgaagtcgtcgtgctgggtggagactacgatggtgtcgatgcgtacgggtgtgccgttgtcatcatattcgatggtcacctggctcttggcgtcgggacggaggtaggtcatcaccttgccctcgcgacggacatctgccagcacttgcaggatgcggtgtgcaaggtccagtgaaagcggcatgtaattctccgtttcgttggtggcgtaaccgaacatcattccctggtctccggcaccttgttccatggggtcctgtcgctccacgccgcggttgatgtcggggctctgctcgtggatggcgctcagcacgccgcacgaattgctctcgaacatatactcgcctttggtatagccgattttcttgattacttcgcgtgcgatgagaggcatgtcaacgtacgctttggttttcacttctccagccagcactacctgaccggtagtaaccagagtttcgcaagctactttcgaactggggtcgtaggccaacagtttgtcaagcacagcgtccgatatttgatcggccactttgtcggggtgtccttcagacaccgattcggatgtgaataaatatcccatttcagttgagaattgatagttgataattgataattcaacgaatggcggaaggaggtgtgtggagtagatgcatccggcacacaaacgtgccgtcagaaaaggatgtgttttagcatttttttctgtggttgcaagctactcaaatctctccacatatcgtttttcgggggcaaagatagtgcaaaccgaacgcagaacaaaatgaacttgttcattttttatgctgaggtgcagcctatcttcgcttttcggaggcaaagataaaaaagaaatcttgtatctgcgctacagatagcagagattaacactgattttgcaacaattccccgattgtctttcccaataccggatgcaccacgcctgaagcaatctccgccaacggctccatcacgaaacggcgttcctgcatcaacggatgaggaagtttcagttcaggcgtatccagcaaaacgggagtaccgtcatcggcaaaacagagcagcaggtcgatgtctatcacacggtcgctatacactgcattgacagacttatgcgtacgccccatctcccgctcgatttcctgcgtcgtttgcaacacctccaaaggtgccaaagcagtgtctacgcagagtgcggcattcagaaaagtattatcggaagaaaagccccacggggcagtagcataaaaagcagatagggaaatcacttcccctatctgctttcttatcttttggacggccatgcggaggttctgctccttatcgccgagattggtaccaagactgaaataaacaaccataattaccggtctgtaatcagcatcgcatctccatacgtaccaaagcggtactcttccttcaatgccacattgtatgcctccatcacctgctcgtaaccgccgaaagcggcaacaatcatcagcagggtactgagcggcatgtggaagttggatatcatggcattggccacggtaaagtcgtacggcgggaagatgaacttgttggtccaaccctcgtattccttcaaatgtccgtcggtgctgacggtgctctcgatggcacgcatcacggtggtacctacggcacagacttggcggttcaggtctttggcatggttcacaatccgtacggcttcctcgttcacaatcatctgctcggagtctgtcttgtgcttggtgaggtcttccacatcaatgtcgcggaagttacccaagccggcatgcagggtgatgtaggcaaagtcaatacccttgatttccatacgcttcatcagctcgcggctgaagtgcaggctggcggtaggcgccgtaacagctccttcgttgcgtgcaaaaatagactggaaacgttcggcatcgtccggctctacgggacggttgatgatgctgtggggcagcggcgtttcgcccagcgcatagagcgccttcttgaactcatcgtgcggaccgtcgtaaaggaaacgaagcgtacgcccgcgcgaagtggtgttgtcgataacctcagccaccatagagtcgtcgtcaccgaagtagagcttattgccgatacgtattttacgggcaggatccaccagtacatcccacaaccggagctcttcgttcaactcacgcaacaagaacacttcaatacgcgcaccggtcttttccttgttaccgtacaagcgggcagggaaaaccttggtgtcgttgaagataaacacatctttgtcatcaaaatagtccagaacatccttgaacatcttgtgctcaatctcacccgtcttacggtgcaacaccagcagacgtgactcgtctctgtacttcgtggggtgcaaagctatcttctcttcgggaagcttgaatttgaattgcgacagtttcataattagttatgagttataagttatgagttatttattatttatatcagtctgttttagtcataagagggtatgagttatccggcagtatgctacacttcatagcaaataacttataactcataacttataactaaatatctatctcctgcgcctctatccactctttgaaatcgaggggattgaggcagtctgccagccggacgtcgcctacacgggtacgctccaaggcggtgaggtgggcgccgctctgcagggcttcgccgatgtcacgtgccagggcgcggatataggttcctttgctgcatactacgcgtacctttatccacggttcggcaatatccagcccgtcgtccagcagctctatctcgtcgatgacgagcaacttgggtttcagctctacctcctctcccttgcgggcaaggtcgtaggcacgtttcccgttcaccatacatgccgagaaggcgggaggcacttgctgtatctcgccgatgaacttcttcagcgtctcctccaccagtccgcgggtgatgtgctccgtgggataggtggcatctatctcatgttccaggtcgtaagagggagtggtggcacccaaccggatggtggcaacgtactccttcgtgtgatactggaattcctcaatccgtttcgtggccttgcccgtacagactatcataacccccgtagcaagcgggtcgagggtaccggcatggcctactttcaacttcttctcctttatccgccggcagatgtggtaacgcgcatgtcccacaaccttgaacgatgtccatcccagcggtttattgaaatagaggacttctccttctttaaaattcattggcctctcccctaacccctcctcggtagggagggggataaaatggtacaacttaatatttttctcttattgatttccggagtaatcagtctttcccccacacaaggaggggctttagcttaatatgagcgttatgacaccggctatcgcgcaatagatggcaaaataaatcagcttgcccttcttcacaatatttatcatccacttgcaggccaggcagcccgaaacaaaagcagccaggaaacctaccaccagcgaaagcgtcggaatatcccctgcaaccgcctcacctttcatcatcttcattccatccagcagtgcctcgcccaggatgggaggcatcaccatcaggaaagagaactgtgccagcttcgccttgttgtcgcccagcaacagaccggttgcaatggtgctgcccgaacgggaaagccccggaagcaccgcgcatgcttgtgccagaccgatgataaaggcatccttcatgctgatgttctccttctgcttcggcttataataataggagaaagacagcagcagagctgtcagcagcaggcagcagcccacaacgaccagtcccgaaccgaaaatggcctctacttcgtccttgaaaaatacccccacaatgccgataggtatcatggataccagtatattgatgacgtaacgtgtctcctcgttcatctgccacttgaacagtcccttgaaaatccagtcaatctctttccaaagtatcaccagcgtactgaacaccgtagccacatgtaccactatcgtaaaagcaagattctcctctccctcaatgccgaacaatgccgaaccgatggcaagatgtccgctactgctcaccggcagatattcggtcagtccttgaataagcccaaggataagcgcttcaaaccattccactgttatgaattataagttataagttattagggtgtaaggggttgggttactgctcccccgcgccgctgcctttaggcttgcgcagcacggcatatatcatgaacacaaaccccagcaggcaaaccaccggagccaccttgatgcgtctcacactaaaaatgtccggctcaaaggtcgtcggggtagacgcgggaccggtcatcagaagaaaaccaatgataaccaccgccattccgatgccaagcaggataaaattggtcttatcaaaagcaaatttctctttactcatctatacatttacaatttaactatttacaatttacaatctaacgtaccgtactaacagtactttctctctatgcactttaaggcgtcaaatataatacagcgtgcttgccttcatcctcagatatttgttgatggagagtaaagcgcacagccacgtaataagtatgccgaacaccagcacggcacccgacaccagcaccatcacctcgggcgtaatcaccttgaccagctccggttcgtaggacaccagccaataggcggttccccacagaatactgtcggctatgaaagcggccagcacacctatccagaaattgcgccgcagaaacggacgacggatgaatgcccagcttgcccccaccagcttcatggtgtggataaggaaacgcttggaatatatagccagacggatggtgttgtttatcagcgcaaaggagataaacgtcagtatcacagccagccccagaagcatcaggctgatgttccttatattatcgttcacggcatctatcaagtctttctggtagagcacttcctggatgttggtattctttttaatcagtttctctattttggcgatgctgtccgaattggcatagtcggaatgcagcttgatttcgatggaggcagtgaaaggattgtagccaaggaactcttgcgggtccgtacccatcgcctcagtctgctcgcggagtgcctgcttcttggaaatgtactccgtctgcttcacaaaagcctccttgtccagcctcttctgcagcttcaggatgtcgctctccttcatgtcgtcactgacaagcacggagaaactgatgttctccttgacgtacacggaaagattatgagccgcgagcacaaagaatacgaccagccccaacagcagcaacaccagcgtcgtactgatgctggacgtaatgaactgcatgtcaaaataggataccgagttattctttcctttcattatatcaattataagttacgagttacaagctacaagttatgtaaatcagtcgctattaatcattaatccctaatcccttttctcaccctttcttcctgaacacgtaaatcatggaactgctgcgttccttcttcaccaacgcgctgaaccaggccagtgtaccggtcaccattccccgcaggaaagtacacgagtgcctcatgtgcttttccgtcagcatggacacgtagaaagcatcgaacggcatgggatgccgctctgccatgatgaagccatgcttggaaccgaattgctggatggtgcccggtgtgaagtgccacaaatggcggggcacatcgtaggcagcccagtaagccccgtatttctttgcatcgaaggaagagcagttgggcacagctacaatcagcacccccttttcagtcagcagggagtgcagggtttcccacgtttcgttaaggggttccagatgttccatgacatgccatagggtgatgacgtcgaaactgcccggtgcaaaatctttcaatgccgtatggggtttcacatccagattgaagtgttctttggcaaaggcacgcgcctgcgcactcttttccacagcttccacctgccagccgcgacgctgcatggcatcggcaaagtaaccggtccccgtacccaaatccagcagacggccctccttgcggtgtgcttcacggaccacaagacgtgccttgcgtcccagcatatagttgcgcacccagtggtacacggagttcatcgcccccttgcgggtatcggtatgtgaaatgtaatcaggagtttcgtagtaacgaccgatttcagcctccacgggaaagtcttgcgtgaaaaggaaaccgcaatcccggcagcggcacaagtggaacatttcgcccgaggcataatggtctacacatgtcagggcacgctccaaatgcgttccaccacataacggacaagcttttatagtgagtttattcatcgaacgttctgccaataaggaagtgcagcccaaatgaaacagaccacactatacctaaatttggtgcaaaataacaaataaaaagtgatttatagggcttccattaaggagatttaagaaaacaaacgcttactccggccagccggcggaacgaatgaccgactgttcgatattaagcggacaactgtccgataatgaacagttttcgaaagcatttattcattgattatcaacaacttaaatctttggcatgggaattgactataattaggcgaaggcgtttgagaaaaagattagttggaatgcaactttttaatcgggaacaacgtctaaaagaaacagagtaagtaacaacaattaaaaataaagattatgaaaactacaaatttattcaaggcagtcgcattcgtagcaatgactatcgtaagcgttatgaatacagaagtgaaagctcaggaaaacaacttcatcaccaatgaagaagtgaaaaacgaattagtagttgccaagaccatctttaagcaagacggcgcacaactttaccggcacatccgttatgaatactcttatgacgaccagaaacgcctgacctgcaaggaagcctccaagtgggacggtgtaaaagacgaatgggtaccttacttcaagatgacataccaatatggcaatgatgaaatcaccatgtcctacgcacgttggaacgagtctcacaaggcttatgacaaagacatgaagaaaagtgtgtatgaattgaacgatgaaaacatgccggtagcttacaaactctacaatcaggacgcgccaaagtccgaattgaccctggtaaactacaacaggactgactacgtagcgaatattctggccatggcagaataaaatttaaagtttataatatggaaagcacgggccgtgaggctcgtgcttttattctatataccggtgtcatcatactgatgtcatcgagacttttctatcccgtcagccggctacctcttctcctttcagcgtagccgaactggattcggtaaccttcaccatcacaaaatcgcccacacggtgcgtgccacggtcaaacaccaccacacggttctgctccgtacggccgaacaactggtcgcggctgcgtttggaaacaccttccaccagcacctcgtacgtcttgcccacgcaacgggcattcgcctcggcagagagacggttttgcaaggcgatgatttcattcagacggcgaatcttcacctcctcgggcacatcgtccggcaggtacttggaagcatgcgtaccggggcgttcgctgtacttgaacatgaaggcggaatcgtatccgcactcctccatcagcgagagggaaagctggtggtcctcctccgtctcactatggaaaccggagaatatatccgtagataaaccacaatcggggatgatgcggcggatggctgccacgcggtccatataccactcgcggtcgtacttgcggttcatcagcttcaggatgcggctgctcccactctgtaccggcaggtggatgtgcttacatacgttgggcatgtcggcaatgacctggagagtttcgtcgctcatgtctttagggtgcgaggtagtgaaacggatacgtacgcccggcgctgcctctgccacggtgcgcagcagcattgggaaagtaatcgtctctccgtccggcttctcgaagcggtaggaattgacgttctgtcccagcagggtgacttccttataaccctttgccacgaggtcggccacttcattgaggatgctttccacatcacggctacgctcacggccacgggtgtagggaacgatgcagtaggtacagaaattgttgcaaccacgcataatggacacgaagccggagatgtggtttccgcagatgcgcgagggaatgacatcccgataggtctctgtagtggaaagctccacgttgatggctttctcaccggcctctaccgaggcaatcagttcgggcagagtaagataggcatccggccccaccaccaggtccacatgatggttggtgattaagtcgtccttcacacgctctgccatacagcccagcacacccactatcaagccgcgtttcttcttcttgagcgagtggaagaactccagacggttcagaatcttctgctccgcattgtcgcggatggagcaggtgttcataaacactgcatcggcttcctccagggtgtcggccaccgaatatcccgccatctgcatgacggatgcaatcacttcactgtcggccacattcatctggcagccgtaagtctcgataaacaacttcttgttgtcatcagcagttgcagatttaaagtctgctcccgttactttttccataatcagttcgtttaaaatcagtttatatcataagttggtatctgtcattcggagcgcaaagatacttcttccctcccaataaacggatgaaatgaaagaaaaatgccattacaagttgtcaatctgcgccttatcagctaatttatgttaagagagcaaacattttccgagtgttaatttggcatagagcaaattaattcacaaatttgtggaatgaaagaaacattagattttttcatagttaaggtttaggttaaaaaaattaaggggagctgtgaagctgcccttttttattaccaattccttggctgtaatcagattaaataattaactttgcccaaaagcaaagataagagataattgcactatctttgggtggaaaatcaaaaagaatatggaagatgtcttcaagtttctgttagttgcggctgtcatagtaatcggactcgtcaagcagtttaagaaagaagcaaataaaaatgctgacaagagtcccgatatacctatgcccgacgttgacaacccattgcccgaatactggggcggagatacttacggaggctttattcccaaaggccccaagccggcagaaaagcccaagccggtatccaaaccgtctgccaaatccaagcacacttccataaaggcttcccctccctccccggcatcccgtccgcaggaatccgatgaagtaacgtccgaatacggcatccactcggcagaagaagcgaggaaagccatcatctggtcagaaatacttcaacggaaatattaaagacagtcgataattgcagaaccaattacgagccccttcagaatctttacacgaaaaaataactatttatattatggcactcaattacatttcggcagcagaagctgcgagcctgattaaacatggctacaacatcggcttgagcggatttactcccgcaggaacagccaaagccgttacggctgaattagcaaaaatcgcggaagcaaaacatgcaaaaggaaacccgttccagataggtatcttcaccggtgcttctaccggagattcctgcgacggtatcctttcacgcgccaaagctatccgctaccgtgctccttacaccaccaacgccgatttccgcaaagccgtgaacaatggcgaaatagcctacaacgacatccatctctcacagatggcgcaggaagtacgctatggtttcatgggaaaagtgaatgttgctatcatcgaggcatgtgaagttactcccgacggtaaaatctacctgacggctgccggcggtatcgctccgactgtctgccgcctggccgaccagattatcgtggaactgaatgccgcccacagcaagagtgccatgggtctgcacgacgtctacgaacccctcgaccctccttgccgccgcgaaatccccatctacaaaccgagtgaccgtatcggcctgccctacatccaggtagacccgaaaaagattgtcggcgtagtggagactaactggccggacgaggcacgttcgtttgccgccgccgacccgctgaccgacaaaatcggacagaacgtggccgacttccttgccgccgacatgaaacgcggaatcattccgcctaccttcctgccgctgcaatctggtgtgggcaacattgccaatgccgtattgggtgctttgggacgtgacaagaccatccccgcttttgaaatgtacacagaagtcatccagaactctgttatcggacttatccgcgaaggccgcgtgaaattcggcagcgcctgctcactgaccgtaacgaacgactgtctggaaggtatctaccaggatatggacttcttccgcgacaaactggtgctccgtccgtcggaaatctctaacagcccggaagtggtgcgccggctcggtatcatctccatcaacaccgccattgaagccgacatctacggcaacgtgaactccacgcacatcggcggtacgaagatgatgaacggtatcggtggaagcggtgactttacccgcaatgcctatatctccatcttcacttgtccgtccgttgccaaggaaggtaaaatctcggctatcgtgccgatggtttcgcacatggaccacacggaacacgatgtcaatatcatcatcaccgaacaaggtgtggccgacctccgcggcaagagtccgaaagagcgtgcacaagccatcatcgaaaactgtgtccatccggactacaagaacatactgtgggattacctgaagctgaccgacggcaaatcacaaactccccacgctctgcgcgccgcactggctatgcacgctgagctggcccaaagtggagacatgaagaatgtagactgggcacagtataaataaaccgctccctcaaaggcggagagaaaccgcccgaaagatataccgcgttgcatgtatatttccggtttgctggatctatatatgcaacgcgttgcatatatagatggaacacgctgcatctatagatccaacaacaagctatttcagtacctactacatccctgcatcaattcctggcaaaacctccttcttaccggtaaactcactatcttttgcttcagtttccttttcagtttcttcaatcgatctctcaccgagccaacacttatcgttcgcattgagtgaaaaactgcaataatttgtctagagaaatacttgcctccatttgatccctcctattcattgaaaacgggctgcctggaatcacttcccggacagcccttccttcacatttaaagtgaagatgcagagagagtagtatgatgacactctattcctgacctccccctaacgccttgtagaggttaatcaggctttgtatttcagaaaatcggtttgccgtctgtgccagttgtgcgttgagcaatgtctgccggacggtaagcacctccagatgggtggtgttgccatgctccatcagcagggaagtgctgcgggcagctgtctgcaaggaagctacctgcttgtccagcagttcgcttttggataggcttgtctgccaagcagtcaaggcatcgttcacctcgctgcctgcattcagcaatgtctgctggaaggcaagggaagcctcctcctgctgggcacgggctatgcggtactgtgcaatgacctgcccgcgggcaaagagcggctgcgtcagcgaacccactgccgaagccaggaacttgccgggattcacaatcattgaaccggcggaattggtccagcccgcactcccacccagcgtaatggagggatagaaggcggaacgcgccgcattggtaccgtagaacgccgcttccagtgtccgctcggctgagcggacatcaggacggcaggaaagcagccggacaggaatccctatggaaaagtccgcggggaactgctgctctgccagcacaccgcgctcgtaatgacggggcgtctctgccagcaacagcgcaaggctgttctccacctggtttatctgttcttccaaatcaagcacggaagtctgcacctgatagtatgtggcctccatctgcgacacggcagactcattagccatgcccgcattcatcagggcacgggtggaagcaacggtttcccgccacgtctcttcggtctgcctggagatggcaagctgctcgtccaacatcagtaaggtatagtaagtattggctatcccggcaatgagttgggtgcgcacggcctgacggtagtcccggctctgcgcatagagtgccttcgactgtttcttggcattacgcatacgaccgaaaatatccagttcccaactggcagtgacgggcaacgaataggtctgcgtagccttgtgagtgtcaaagctgctcaccgtgccctgcggtgcaagggcaaaggagggcagaaaagcaagctttgcggacagcaaggtggcttcggcttcctccacacggagttgtgccaactggtagtcggtattgttctgtagcccttgcccgatgagtgcctgcagatgcgggtcggtgaaaagctcgtgccagtccatgccgcccaggccaaggtccaggctgtcttcgggagccaccggagaaccgtcggtgctctccgtaaaagtggctatttcttccccgtagaggccgtcggggacctcggtagcgggtttgtatttggtgtacacgccgcaactgctgaacagcaaaccggcggcggacaataggatgatatgtttcttcattgttccaatctgtttttattttattttcctcaatctttcgcccgttctgcctcactcttctgcttttcaagcaatacctgcatatcggcttcttcctccattggcggacgaaccttctcctgcaagtactcaaagatgatatagaatacgggaaccacaaatagcaatgccaatgttcctacaagcataccgcctactacacccgtacccagcgaagagttgccgttggcacccgcacctctcgagaacatcaacggaagcataccgaatatcatcgtcagcaccgtcatcaggataggacgcaggcggacctgggcggccgagtaggccgattccacaatgcccattcccttgcggcgccgctcaatggcatactccgtaatcagaatagctgtcttggcaagcagaccaatcaacataattacacccgtctgcaaatagatgttgttctccaagccaaggactttggcaaagaggaacgaacccatcagcccgaacggtacggagaagatgaccgcaaacggcaccaggaagctctcgtagagacatgccagaatgagatagataaggaagatacagatggcataaataaagacagtctgcgcaccaccggtattggcttcctcacgtgccatacctccgtactcgtaaccgtagcccagcggcaatgtctgttccgccacttccgcaatcactttctgcacttcaccggacgaatatccttctgccggattcacgttggcagagatggcgctatacagattgaagcggttggccgtctccggaccaagcacccgattcaatgtcacaaactggctgaccggagccatctccgtaccgttgcgcacaaacatattacccagtgcctgttcgtccagacgatattcgggcgatgcctgcatcatgacgcggtataccttaccgaactggttgtaattggagatataagctccaccgcaataactgcccaacgcgtcgagcaccacactcggcgaaatgcccgcacgcttacacttggccgcatctacatctaccgatacctgcgggaagttcatagcataagaggtatacgccatagccacctcaggacgctggttcagcgcacccaggaactgtatcactgcctcgtagaacgttgccatgtcaccgcccgttctgtcctggaggttcagctctaaggagttacccataccgtagcccggaatcatacccggctggaagctgaatatctgcgcctccttcacaccgtagaactgggcattgaggcgtgccaccacagcatcggacgtgtgttcgctcccctttcgctcaccccagtccttcagacggatgatgatggtgccgtaggaagttccctgaccggacatcagcccgtagcctgccaccttggcatagtgctctatctctggtgtgctcttcagaatatcctccaacttgttcatcaccttcgtagtttcttccagcgtgcttcccggtgaggtgctgacgttcaccatgatgacaccctggtcctcctgcggcacaagccctgtcttggtggtgctcatcaagtaaaccagcaatacgacggtagccgccaatgaagtccacaccatccagcggcggtggataaagaacatcacacctttcttatattttcccagcacggcgttgaacgaagcattgtatgccacgcgcacccgtccgttgatgctcttcgcactcttcgtgccgtccgacggacgcatcatgatggcgcacaaggcggggcaaagcgtcaatgccgaaatcatggagatgcccactgccgttgccatcgtaatgccgaactgcgtatagaacacacccgaagtaccacccataaacgtcacggggataaacaccgccatgaacacgcaggtacaagagatgatagccatcgtcacatcgcccatcgcatccttcgtggcaaggtagggagacttatatccggcgtcgaacttggactgcaccgcctccaccaccacgatggcatcgtccaccaccgtaccgatggcaagcaccagtgcaaacagcgtcaggatattgagactgaaccccgcagccaccaggcaggcaaacgtaccgaccagcgacacgataatggagatggacggtatgagcgtactcttgaggtcctgcaagaagaagtacaccaccaggattaccaggataatggcaatcaccagcgtctccaccacattgtgtatggaagcgaagaggaagtcgttggagctcatcatcgtcacaaactccgtcccttcgggcaggctcttcctcatctcgtctatctgtgcagtaatctgcttgttgacggcggttgcgttggagcctgccgtctggaacatcatgaaaagtacagccggcttgctgtccatctcactgcggaaactgtaagtcaacgtacccagctccacatccgccacatctttcagacgaagcacggaaccgtcgctctgcgagcgtaccaccgtattctggaattcctccacacttttcaggcgtccgcgatatttcatcgtaaactggaatacgttcttagaactctcgcccagcgaaccggtaggcgcctcgatgttctgctcgcccaatacggcggtcacatccgaaggaaccagtccatactgcgccatccgttccggtttcagccagatacgcatgctgtatgtatcgcccagctccattacatcacccacaccttcgatacgcttaatctgcggaatcacgttgatatcgaggtaattggctaggaaagtctggtcgtagcgtccgtcggtgcttaccaaagcaccgatttgcaggaagctggtctggcgcttctgggtagtcacaccgattttcgtcacttcggcaggcagcagtccctgcgccttggatacgcggttctgtacgttcaccgcagccatgtcggggtccgtgccctgcttgaagtagacctgtatggtggcagaaccggcattggtggcggtagagctgatgtacatcatgttctccacaccgttgatactctcttccaacggcatgatgacactgttcaatacggcttcggcgtcggcaccggtgtagttggcactgacgtacaccgtgggaggtgcaatatcaggatactgttccaccggcagcgtaaagagcgagataagccctatcaccagaatcagtacggagatggagatagccatcaccggccgctttataaatatatttcctttcatcttaatgggtcattgatagttgataaatagcagttcattatttcacctgtgtcccttcgcgcagcagtccggcaccggtggaaacaatctcgtcgccgacttccagtccgtccagcactacgtattcgcgtccgtcatttattccggccacggtaatcaaggcagaaacggccttgccatccactaccttatataccactgtcttgtcctgcaactgcacggtggcctcttgcggaatcacaatacagttcttataagtggtaggcaccaccaccgtgcccgacgccccactgtggagcaggcgcgattcattgggaaataccacacgtgccactaccgtacccgtctgacggtcaatgacgccactgatggactcgatggttcctttcttgtcatagacggaattgtcgttcagtctcagttccgcttgaggcatgttcttcaacgcctcgtccatgcttccgtattggcgggtcagggcaagcaactggttttcggtcatggaaaagtaaacgtacatgtcgctgttgtcactgaccgttgtcaacggctgcggcaggctggggctgaccaatgctcctgcacggtagggcaatgcccccaccaccccgtcgctgggactcttcacttccgtataggagaggttgttgcgcgcacttatctcctgggcttcggcctgcgagagctgtgccttggcggtaagataggcgttctcggcagtcttcagactaaattccgaaaccactttctgcgcatacagttccttgttgctattgtaagtcagtgcagcagtagccagtgcagcgcgtacagcctccacattggccacggccgttttgagggcagccttgtagggcacttggtcgataatgaaaagcgactgtccgcggcgcaccttctgcccctcagtcacacaaagcttctcaatggtacccgacacttgcggatagatatctatgtcctgccgtccgcgtatcgttgccgaatacgaagtggaaagctctttgtctgtcgcctccactttcatggtagcgtaagaaggtttcattccggaagcatccgttgcctgcttgcaagatgccaaacacattgtacaaccgacaatccctatcagccgtatccatttcctgtttaatgtaatcatactctttctcattgtatttttgttaaaactggtggcaaaagtaggagaaaggaacaacgccataatgaccaattacactccaaggatgtccctttttcgacattcatcttttttaaggctaatgaattgtctataaatgacatatagaacaagaaagccgcataatggaacattccatatttcccattattcaccaactttgcaaaacgaaaaaggaagaatatggagaaagggaacataaaaatcgtagaaatcgcggactttaagaacagcgaacatgtccttgactatgtagacaatgactttgtcataatcaacagtctggagggaagcccctacaatgaagatacaataagattaggatgcttccttatcgctatctgtctagaaggctgtatccagttggacgtcaactacaaaacctaccaactggaagcaggcgacttactgctcggccttcccaataccattatcagccacgcgatggtaagcccaaagcacaagataaggcttgccgcattctccacacagttcctacaacgcgtggtcaagatggagaaggatacatggaataccgttatgcatatccacaacaatcccataaaatctgtcggggaggaaggagacaaggaaatcttcaaattctaccgggaactgcttatggcaaagataaacgacgagcctcatccctatcatagggaagtgatgcaacacttgttttctgccattttctgtgaaatgttgggacacctcaacaaagaagtgaacccttcagcaatgacagccgatacaaaagaaagcatcaaacagtccgactatatcctgtgtaaatttatagagatgttgtccaaagacaacggcatacaccgttctgtaggatattacgccgatgcactctgctacagccccaaacacttttcgaaggttatcaagcaggcgtgcggacgtacaccgctggacttgataaacgagaatgccattgaacacatcaagtaccggctgaagcactcggacaagtccatcaaagagattgcagaggagttcgatttccccaaccagtctttcttcgggaagtatgtgaagtcttatctgggtatgtctccggcacgctaccgcaatacgaaagaggaatgatttcccctactcttggggctcactccgtaaaggtctgcattaggaagctaaaccttaactttacgacgctaaaggtcaactttacgatggctaaacctcaacgtatcacttcatcacacactgcatcctggaaagcgcgtgcttctctgcccgacagtgcattctggttcatgatggcaaaggctatctcgtgtccgttgcgggctttaaggtagccggccaggcagttgatggcggtaaaggaacccgtcttggcatgtacatttctgtgggaaagggtgcctttcttcatgcggaactccagtgtaccgtccacgccgccaatgggcaaagccttataaagtttctggaaaacatccgtacgcgagtaggcatatcgcaggaaagaaaccaagagttccggtgaaatgtagttgtaattggaaaggccgcaaccatctgccagattatacctatcggggttatatcccatctcttttatcagcatgcggatggcagaaagcccgtcctcggcagagacacgcttctttctgctgctctgcacacccaaccggcagagcatggcttcggcattgagattatcgctctccttcattatctgtttcaccacatcctgcacggaagtttcataggaagccatccgcacggaaagactgtcttgccggaactcgccgaagaggtaagagacttccgcttctgccgccggaatgcaccggatgcctcgtgcctgcaaccgttccataaaggtatgcatgaagaagtcctgcgaagaaaatatattgaccgtacctgcacggcgggcatcgacgttgcccgtcacggtgatgttgttcccgttcaccagccagtcgcgcgacacacggaaacgtccggcagaaggggtacggctttgggtcttgttcgtcagtgtataataggaagaggcgggagtgcattcaaggcgtgcgctgtcgccccgttcgccgggtgtggcggtaaccttcaccactcctttattcagcatcagcggtgagaggtagggctggaaggaatagggagtatcatcccacaaccagccgctgccccagtacaaggagtctttcatggagacatctccatacaccttgcctttgatgacagagaaggggaaacgggccacggcagccaccagggaatccaatgcctcttcatcaaactccgggtcgtaaccgcctatcacatacatattcccctgcaaggtatcgcgctcaatggttccctgataccacacttccgtacggaacggctcgtcggcttcgggacgggaaagggcggtaatggtggtcagcagcttcatggtggaagcgggacgggaaagcttgtccgcctgatagccgtacaagggcttgccggcagtcaggtcatagaccgaaatggccacattagagcctgcgggaagtttgtgttctatcaacgcatcaatccgcgcagagagcggcttcaccggagttaccgtctcttgggaccacaatgggagcaggcagacggataaaattaacagcaacaatatccttttcataaatatatttatctttaaaggcaaaagtacgacaatcttacaaatgaacaataaccaggtagtcttttcataaattatatccagccatccatcttaatattcctttaaaaatactacttttacataggcaaaatctcccagttactatcactctaaaattgatgtaccatgaaactacaacttacaattgccagctttacaatatgcctccttttctcccccatgcttcgggcacaagaatctccgcgcattgtcagttatgacttaaccgtacagattgatgtaccgaaccgacaggtcgaaggaggcggttcgtttgaagttgatttccaggacagtgactcaatctcgttggtactatggcgccatgcccgtatcgacacactacgccacaacagccgggagataacctaccgtttcgatacgcttgccccagcacctgcccaattcattcccgacggacggaccttgaccctctaccggccggcaggagccgatgaccgctgccgcataaatacccgttacacactctacatgcaggaagtgcagggccctgcaaaatcattcaatgaccattggattgaacttggttactatacgggatggtatcctgtctgcaacggtaaccgggcagattattcgcacttacgaatcggcatcactgacggttatacggtgagcggctcaggtattatttcccatacagaagaagggatgtgggaaatggagcaaccttgggagaatttcgacaatgttatcctggcttcacccatgctgaaaagccgccgcatcaatgataacggaactaccattgaacttatctatacagacttcccggatgccggtgcagactcggcacttcaatgttgccacaatgccttgaaattcttccgacgcctttataaaattgcgggagatgaggatatttacatgaaattcctgctttcagcttccggcacctcaggagggtacagccgtaaaaatttcattatgctcagttcacgaacattcaatgaatatgtactcaagaacaccgcccacgaaatcggccacttctggtggaacaaggctccggtggaatcctggcacgactggctgaacgaatcttttgccgaattcagtgctttgcaatacatacgccacgcccgcggcgagaaagcctatgccgcttacatcgacgcctatcgtaaggaaacacgccatatccgtcctatctggggtattgaccgcaacgaccgcgaagcgcatcttgccctctataggaaagggtcagtactactcgccgacctgcttgtccgggtgggtgaagaacctttcttcaactttctggcaggtgtcatccaagcccatataacagacacatcggctttcctggattttgcggaaagccgattgggacgtaaaaaccgggactggattgaaaagcggttaaaagaataaacacctgattattcttcaattgttcctttcgccaccggcttctcaaaatgagtgccgcacttcctgcatacatactcccaatgctcagtgcccggaggtgcggccgacaatgccgcaataacagcagccaccacagcacgcacccgatggctcttcttcagcacaaacttaatctcatccgaaccgcaatgggggcagtacctcaactgttccggaatcatctggttccgttcaagcagacggagggcattgtcatattcgtcctcatagacaaatatatccactcccgtgacatcacggacatatccgcgcatcacggaagacatgttttcattatgcaaaacagacgcaatgccctcattcttcaaggcaccctgaataacatgtgcctgaaaggcatcgtcgcaggtgattagctttacggttttcatcttttatgtttatatgaaacaatagtcatgggttctacaatgcctccttgaatatctctcccaccgtggggtgcggaaagacaatcttcttccattcatcggcagtaagtttcagctcaatggccatgcctgccaacgtgatgatttccgaagcgggattacccaaaacatgtgcccccaatacggtatcgtcgccacccaacagtaacttgcagacaccgttcacaccttcgttctcggcgacgaaacgaccgctgtacgccatcggcagcttcactgcacggtaggctacgcctttcttctgaagggattcttccgtctcgcccacaccggctatttcgggattggtatataccacgccggggatggcacggtagctcatggcatccttcttgccaatgatggaatgtatggctacttccgcctcgcgaacggctgtatgcgccagcaaggaatatcccgtcaagtcaccgcaagcatatactccgggaacggaggtctgcatctgtccgttgacaaagacatttccgcgctccgttctttccaagcccagattctccaatccgaagcctttcattaccggacggcgcccgacactcatcagaagccgttcggcaacgacggaaccgggaccgtcggctgtttcataattcacctggataagggaagaagcttcggcagtatccggcatgacagacactacttttgcactcagcatgaacttgattccccgcttggcgtactctgcacggagcatacccgccagctctcggtccataccgcctcccagtatctcgtccagcatctcgacgacagttacctgcactcccaggctgttgaagaaagaagcgaactccataccgatgacaccgccgccgatgatggcaagcgaagcgggcagttccttgttatccagcgcatcacgatgagtccaataggacactttgtctatgccgggaatggcagggacaaaggtttcggaaccggtgcagagcagcaggttctcgcattcgtaggtttctccgccgcactccacatgattcttgtccgtcactgtggcctctccactgacaatcgtcacaccatgggcagtcagctttcctttgactcccaataccagcttgcgcactaccttctgcttgcgggcaataatcttgggcaaatcaaacgatacttcgggcacactgaccgcatacttcgaagcatggcgggctccgtcataggtcttggccgaatacaacaaggtcttggtagggatacacccttcattcaggcacactccaccgagactctgcttctcaaatagtacgacactcaatcctgcttttccggcagcttcggcagcagtatatcccgcaggacctccaccgataatggcaacttggtatttcatggaatcaatgattaatggttagtgattagtggttaatttgtgcgcaagttaataaaacccgtattatccggcaaaaaagagtacttctttctttcggagaatacaccgtaaagaggaaataattatctttgtcgtgcagcatttacaaagaatgccacgtccaatggacataaatcaaataataaccaacatgaaaacgactgacttattccaacccatccttctgttcgctctttttctttgcggcttgacagcttgtagcaacgacgatgaccttcgcctctcgcccatgcaggaaactactctggatggagatgcctctaccctgcagatagacctgacacgtagtgactggcgcattgcctccatcaccacccttggcggaaccacaatggtagacaccaacaaccgccccttacagttggaaggcttgggaagccttcacttccgctggtttgacctcacccgcgagaacgaaacccggctcacactaaagactgaagataatttcgacggagaagaacgcgggcttatcctcaaccttgagatgaagacgggcttctacaaagaacaaatcaccatacggcaagcgccatgcgagaatttctatcagatagaatccattgaatacagcgtggaaaataatgacggggtggaagaagccgggacggaacccgacaagagtacctataaagatgaaactatgggcaacacaaccggaaagcatgaccattatccgttcatcaacaaatggacagaatacgcattcttgctcaacgaccactccaacgatgtcttcaactggatagacccgaagaaacgcagcatctacctgcccgaccgtatagaagacggaaaggtggtgatggggcaacaacagctattcttccttgcccaaggcaagtactacaaagaagacgaattgagatataaacattttgaaatggatatagtgggcatgaaatggaacatatacacttcaaccatctactacaaacggcttcaagtgacattcaccgccactctttcacgtcccggtagcgatacaaagaaggtactcaagggtaaattcatgcagagatacccttatgactgctcggaaatacatcacgaagtaaaggattctttagaagattagagtccggtgtctgtcagacaagactccacctcctccctgctcaatgccggagcttgcccatcggcaagcttgcggcataccaaccgaccggccgccagcgcttccacctttgttgcaaatggcaggcgaccgctcaaagcaggtataaaaggttgatatatcagggtatcggctccatgcagcaccacgtagccgtaaccgccttccacctccatcacccggcatttcaactcattgccaccgccggcagtatgacccgaacagcaagaaaggcataccgccatcacagccggtacacctatctttatcatcataaacatcagcttcataagttccgttcagttatggggcgaatcagacttcctcttcctcatcgggtagaagttcgtacacatcatcaaagtagctggtaccacttgttcccgtcagcacaaaaccacgttcgccggtagagaaaccaacggcagccctgcgcgaagaagcaccggaaggataattatgtacatctgtaatgggggtaaagtcgtcatcggaatcgccgtaccataagtccttgtcagggtcgtacagccagtagtcgctgctcaaggaagtgctgttacgtattcccgtagccacaaatccccttccaccgatgacgaaggatacggcttcggaccgtgtgatggcgtagtcatcgtcatagtcattgtcggagtccgtatcggcaatgtcacgcaactgggtccagttgcttccgtcgaacttccagaaatccaccagatcggtactgttgtttcgcccgcaacagatgtaggccacctcatcgatgacgaatgccgtaccgaagtagcgcttctcgcctccatacccgctcaccgcttcccattgcgaaccttcggcgccattgggattgaaacggtaaaagtccatcttgtaggcactctcgctgccggtagcgtcgctgttgcagcccgtaccgacatagccatatccgcctatactgaaagccagggcaccgtcgcgcaccccgcctttgaagtcgtctttccgtgtccaggcatccgtggcagggtcatactcccaggtatctgccacacagtaggacgaggagccgtccttcacggaaccggtcgtaatgtatcccttgccattcacggcaaagcccacggcagccttgcgcccggcaacgggcatgtcggcacactgcgtccagctgttccggctcatgtcatactcccaaaggtcgttcaggtaatccttgttcgctccgtagaagccaccacacaaatacccataattgccgatggtgaagccggaggcataagcgcggtacacaccgttatagctggctttcttcatccactgcccctgagtgtattcatcctcgtccgtacaactgccggcaatgcacacgatggccagcaacattattcctaccaatagtctgttcattgtttattgttttaaagattaatttttcatacccctcgttcccctgaagaggaaggagaatagttttagtatcgggatgccgaaactattcccctcctctttcagaagggcggaagttctgcccgcaaaagtaaaccgccgcaaccacaccggcaaaaataaccgacgaacagtccgaaattcccgttaaacgcctttaccgataaaaaccgtccgaacgccgatttttgtaggaagatataaaagttttgcctttcctttgccgccaactaaaagaacagaaatgaagaagtcattgtacagcttattcgcagtcctcgctatcttctgcgcctgccaggacgagaactcgcagcttggaaagagcctcgtggaaagctccttctataatgtatacgcagacacctgctcggtagacatcagcaccatcctgctagactccatagagacccggggcgactgcatctgccagctgggacattaccggagcagcgcctggggagaagtatccgccacctactatgccgaatactccacgtccgacttcacccccaacacagactatacctataccctcgactccctcgtactgcgaatgataccttcgggccatttctggggagataccctgacgcaacagcgcatctccatctaccggctgaaaaaccctatcgtgctggacaacgacgaggacctttacaacagcaccgtactcccgacggaagataccccgctcttcagctttaccttcaccccctgcccggggcggaagaaggaagtaagcgtccgcctgcccgactcatggggacagcaactgctgaatgacctcgtggcccaggacgactacttcgatacccaagacaagttcaagaagaaattccccggactggtctttgttcccgaaaacgacgggcagtgtatcaccggattcatggtgaatgattctgccatgaacatcaacctccactatcaggaagtctccaaccagcggaccggacaagtgctgactttcaacgtaaacaccgactatgcctataccggtatccggcacgaccccaccggcacccaccttgcttccctgaaaagcggaatagagaacctcgtccactccagcgacatgggttgcctggcctatatgcagggattgacgggttactacaaccaactggaattcccctacctcaacagcctcggaagtgccggacagatagtctccatagagagcgccacactctacctctatcctctggcccggagctacaacgaagtgagccagcttcccaatgacatccgcctttatatcacggacgagaacaatgtgctggaggactacgtatacggcagtgacggcgtaaccgtacagaccggcgacctgaccatcgacgagatgtacgggaaagagacctactactccttcgacctcaccgaattcatccgtaacaactacggcacttcgggcatcaagcggcagaaactgctgatgagtctgacagacgaagaaagcaccaccaccttcaaccaggtcatcttcaccaacgaccccgaacaagaaaaccaatgcagattagacgtaagattcaaaatatacaacgagcaatgaaacgccattaccggattccccttctgctgtgcagtctgtgtacggcaagcctcaccgccgtggcacaaaacaccaccaacctgcccacctccatgtacggagtgggcgaactgagtgccggtgacggcggacgttatgccggcatgggcaacacgggcatcgccttgaaccgtaccggatttctgaacacgctgaaccccgcagccatcacccgcatggacaccgcctgcttcacgttcgatgtgggtgtatctgcctcatatgcccgctactccttcctgagcgaacacagctccaacttcaccggcaaccccaaccgcatcagcatgggcttccgtgtcctgccgcgctggtatgcccttgtaggtgcagcaccatacagcagtgtgggctatgtcatccagaccgaagaagagatagagggaatgcccggcaactacacctactcgctctttgagggtacgggcggactataccggtgctacgtcaccaatgcctttgcactgagcaggcaactgtcggtcggcatcaacctggggatgatagtgggcacagtgacacagagcgaaacgcaggaaagcgccattgtaaagtacgaatcttctaaacggaccttttatgcggacttcggcatacattacgaatgggatgcgaccggacaacggaagtgggcggcagggctggtatttgctccctcccttcccatcagccacgacaatacactgacctacagcaactcatctaccagcgagaacctcgataaaggataccacagccgtacacaatatctgcccatgcacctcggcaccggcctcagcatggccaccgaacgctgggtgctgaccgccgactacaactacctggactggagccgcaactcctcctcctacacttccatgaaatacgagaaccagcacaaagtgaacctgggaggcagctacattaccaagccacgcctggcacgttccaccgagctgatgggcggaataggtttcggcaactcctatatcaatctgaaaggcgggaagatgcaatatctggaagccagcgtaggggcgagcttccccatccggtactcctatctctcgctgggcgccacgtggcggaaacaactgaactcacgcagcaatctgatgcaggaaagccggttcagtctgaatctgaacttgacgttcggggaaagaatttcgagagcaaaactaaagtaatacaaggttctggttcaccacagattacacggattttacaccgaatgattatcatttgttggatctatatatgcaacgcgttgcatatatagatgcagcacgctggaactatagatccaacaaacaaagtatatagtatctgaaaacggggtattacaacactgccagcctggacacatacccttttaccctttcgcggtaagcatcgccaatggggacatccttctgctcgatgagcagtgtgctgcgcccgatggcgctgatgcagtccatgcggacaataaaagaacggtgcacgcggataaattcgtccgccggaagtttttcctccatgtacttcatactgcataggctcaagataggcttaggggaatctttacagaaaatcttcacataatcgcccataccttctatatagtttatccgttccaggtcgagccgcatgatgcggttgtcacaccgcatgtaaatcaccttcggaacctcttccggaccttgcctgtgtttggagtcggacgtacctgcatcctgcaaagagaaccagcgtgccgctttgctgacagactggaaaaacgtggagaaattgagcccgtccatcagatagtccaacgcatccagacggaaacattcggcagcatagcggtcggtgtctgtaatgaaaatgacacgagtggacgaggacaagagcctgcaaaaatccattccgttgatttcaccttcttccaccggatagatgccgacaaaataaacttccacttttgtctcataataatccttcagcgcttcaagaggattgccgtactttccgtgcaaagagagaaaaggaactttgccgatatactcttccaatcttccggcaatctccgggtccgcatgcaaaatggcacaattcaagttcatatccgtttcttttttacataatggacgctgccacatccaaaaaactgcaaacagaagagctaaaattaagctttatttatgattcaaaaacaatctgcctctacggaaagactatattatcaggaaaataaagtgcttattatgaacagtttcaaaaaataaacttatctttgcatgtacatccccacaaaaagtaaaggctatgaaacaacagaaactattccacctcgtattgtccgccatgctgattgtttgcacgaccggctgttatgataaagacgaaattaaagatgctgaaaaatatctgttcaaagatattcaatactcttttgaagaaggggatggattcagtacgtatgatgtagagctcctgcccttcatcatggaaaacaatttaaacaatagtatcaccaccacaaactcccccttcgaagacacatggcaggaaaccacctttcagagcaacgaccccgaagcatttgtatggatgggggaagaagatgtgttcgtcaataccccttacatgtttggagatgaactattgttaagtggggcaaccataaaatatggcagcgaaacaacaaaagccaaaggtccaaacagcagtacttccaccatcagcatacaacctcactgtcggctcatcataaaaggaacactacactacagcaagcttgtagctacctatacgctgacattcgtaggtgaatatacaaaaacggaaaaacagataaagggaaagttcatacaaacaactccggaaagctacacaggagacattaccatgaaaccgataacggcagattaaaacggaatcacatacgtgggcacaccatattgctcatcctctccgttcctccatcaaccggatgaattcctcctctttgaccggaaacaatacctcgcacttacccgctccatacttcaccagtacgtagcgcattactgcaaatcgtcctatctgcatggaagaggcacgctccacggaaatgacatccttcagcagaatctccttgctgcgcgagaagcggccgaaatacaatttcagcttcccgtccggagtcaccgtataggtagtatgaatcagcttctcgatgacaactatcagccaaagcatgaaaagcgccgcaggcagcacgtatttatcccacaacatataaatggcaagaccacttatcagagccagaaacaaaaactgccctacagcaatacgggcatgaaagattctattcattctatcggatttttgccgctaaggtaggtctttttacgaataaatccctacggaatgaacaaggaatgtacttattttgtagttttgcagcgataaacactaaatcctatggtaagaaagttcgatttcctcgttatcggctccgggcttgccggtatgagttttgcgctgaaagtggcgcacaaggggacagtagcccttatctgcaaggcaggtctggaagaagcaaatacctattttgcacaaggaggtatcgcttccgtcaccaatctggctgtggacaacttcgagaagcacatcgaggacaccatgattgcaggtgactggataagcgaccgcgaagccgtagagaaggtggtgcgcaatgctcccgaacaaatcaaggagctcattaaatggggagtgaacttcgacaaaaaggaggacggagagtttgacctacacaaagaaggcggccactccgaattccgcatcctccaccataaggataatacgggtgcagagatacagaccagcctcatcgaagctgtgaagcaacaccccaacatcaccgtactgaccgaccactatgctgtggaaatcattacccagcatcaccagggaatcatcgttacccgccatacccccggcatcaagtgctacggtgcctacgtgctgaacgaagcgacgggcgaggtggataccttcctttccaaagtcaccatcatggcaacgggcggttgcgaagccgtttaccgccataccaccaacccactggtagccacgggagacggcattgccatggtctaccgtgccaagggagcagtgaaagacatggaattcatccagttccatcccacagcccttttccatccgggagaccgcccctcgttcctcatcaccgaagccatgcgtggttatggcggcgtgctgcgcaccaaagacggaaaagaattcatgcagaagtacgacccgcgactctcactggccccgcgtgacatcgtggcgcgtgccatcgacaacgaaatgaaacagcgcggtgaagaccatgtgtatctggacgtcacacacaaagaccccgaagaaaccaagaagcatttcccgaacatatacaagaaatgcctcagcatcggtatagacattacaaaggaatacataccggtagcccccgccgcccattatctctgcggtggtatcaaggtggacttggacggacagagcagcatccgccgtctgtacgccatcggcgaatgttcgtgcacaggactgcatggcggcaaccgtctggcaagcaactcactgattgaagccgtggtttatgccgacgcggcagccaaacacgcactgagcgtactggaacgttatgacttcaacgaagacatccccgaatggaacgacgaaggtaccatctccaccgaagaacgtgtcctcatcacacaaagcatgaaggaagtaaaccagattatggaggcatacgtaggtattgtccgcagcaatacccggttgacacgtgcctggaaccgactggacatactttacgaggagacagaagcactcttcaagcgtagcaaggctacccgggagctgtgcgaactgcgcaacatgataaacgtaggatacctgataaccaagcaagccatggaacgcaaggaaagccgcggactgcactatacgatagactatccgcacgtcgggaagtaactaaagtaaaactcgcgccactatactggcacggaaaacgaacatggtcatttaaacaaagcgcccggatgctctgaagaaagcatccgggcgtttcccgttatccatacctgcacaagcaggagacattatcaatagtttgacttctttacttcgaagtaagcctgcggatgcaagcaagccggacatacctgaggagcttccttaccggtgtagatgaaaccacagttgcggcactgccataccacttcaccttccttggcaaatacgctggcggtctctatattctggataaaagcgcgataacgttcttcgtgtcccttttcggcaatggcgatgttacggtacataagagcaatttcggggaaaccttcttcgtctgcaatatcagcaaacttaggataatccaatgaccactcttcgtgttcgccggcagcagcttcctgaagattttccagggtagtgccaataacacctgcaggataagaagcggtgatttctaccataccgccttccaaccacttgaacatacgtttagcgtgttccttttcctggtcagccgtttctgtgaaaatagcggcgatttgttcgtaaccttctttcttggctacacttgcaaaataagtgtaacgcattcttgcttgtgattcaccagcgaatgaagtcagcagattcttctcagtctgagttcctttaacacttttagccatagtctctttttttattagttaatataattacgtataaatgtcgttcgtactgtttataaacaacacaaaattacgaatttagtttggaataatcacacctctgccccatcggatttatttatcgtcttatagaaagaatctatcttcaccgataatccgaaaaggcattttagcataataatagcacatatctgataaggaaaacaaaatacatcacagttgtgttcactaatatccattattttatctacttttgcaggcaatttgcaatatatacattacattctgtataaaaaaacgtataaaaaagtagattataatgaaagcgttcggattcagaccaaagctatacacggctttaaaaaattactctaaagaactgttcatggcagacctgatggcaggtatcattgtaggtatcgttgccctcccgcttgccattgcattcggtatcgcctccggcgtatcaccggagaaaggtatcattacggctatcatagccggtttcatcatctctctgatgggtggaagcaaggtacagattggaggaccgaccggtgcgttcatcgtcattatctatggcatcatccagcaatacggtgaatcggggctgattgtcgccacactgatggcaggcgtactgcttattctgctgggagttttcaagctgggagctgtcattaagtttatcccctatcccatcatcgtaggttttacaagcggtattgccgtcaccatcttcaccacgcagattgccgacattttcgggctgacgttcggaggagagaaagttccgggagactttgtaggaaaatggatgatttatttccgacatttcgataccgtaaactggtggaacacgattgtaagtattgtcagcatcttcatcattgccattacaccgcggttctcgaagaagattccggggtcacttattgccatcatcgtggtgacagtggcagtctggctgatgaaagtatatggaggcattgattgtatcgataccatcggcgaccgtttcagcatccgtgccgaactgccggatgccgtgatgcctgccttggattgggaagcgataaagaacttgttccccgtagccattacaatcgctgtactgggtgccatcgaatctttgctgtctgccaccgtggccgatggtgtgataggcgacaaacacgattccaacacggaactgatagcacaaggtgttgccaacatggctaccccgctgtttggcggtatccctgccaccggagccatagcgcgtaccatggcaaacatcaacaacggaggaaaaactcccgtagcaggcatggtgcatgcagtggtattgctgcttatcctattgttcctcatgccgctggcacagtatatcccgatggcttgcctggcgggtgtactggtcatagtatcctataacatgagtggttggcgtacgttcaaagcactgctgaagaacccgaaatcggatgtcacggtactgctgatgaccttcttcctgaccgtcatcttcgacctgactattgccattgaagtaggtctggtgattgcctgcgtgctgtttatgcgccgcgtcatggagactaccgaaatatccgtcatcaaagatgaaatagacccgaatgcagaatcggacattgcaagcaatgacgagcacctgataatccccgaggatgtggaagtatacgaaataaacggtccttacttcttcggcatcgccaccaaattcgaagaaatcatggcgcggctgggcgaccgccccaaagtgcgcatcatccgcatgcgtaaagttccgttcatcgattctaccggtatccataacttgacaagcctttgtgagatgtcccaaaaggaaaaaataaccattgtgctctccggtgtcaatgaaaaggtacataaggtactggaaaaatcgggcttctatgagctgttgggcgaagaaaatatctgtccgaacataaatgtggcactggaaagggccaaaatgattatccaacactaatcccggcatggcacgaaaaaaaaagaaacaatcgcagggcgtctattatcttatattgtttatatgtgcagtctgccttgcctatgaacccgttgcaaagatactttcggatgccaggcaaaagaattctacgcctgccaagatagaactcacagcaggcacacgccttgaaataccggcaaagctgaagaacgtctccgaacagattctccagcggaaaggctacacagtatcctacaacaaggatttaaagatacccaattgggtagcctgggaactcactcccgaaaaactggtggagcgtgaaagccgtacagacaagttcttgcccgaccccgacctgcctgagcacgaggcagtaaccaccgatgactacaaaggagccggcatggaccgcggacatatgtgtccggccggtgacaaccgctggcactggaaagccatgcaagagagcttctacatgacaaacatttgcccgcagaaccacaatctaaaccgtggcgactggaaagaactggaagagtcatgccgccgttgggcacaagaagaaggcaagatatacattgtatgcggtcctattctctatgaccaacgtcaccgtaccattggtaagaagcacaaaattacagtgcccgaagcattcttcaaggtcgttctgtgtgcagacagcaatccccccaaagccatcggcttcatttataagaatgcatcaggcaatcatccgttggacagctacgtcaatacagtggacgaagtggaacggattacaggtatcgacttcttccccgcccttccggatgaaatagaagagaaggtggaagccgaatatgacttgaaactgtggtaaaggagctattcctttacccaggcatctacaatctcggctacataaacccggtgcaatccaccgtggtcaccgccataccaacgctcgtagacggaatggtcgagaaagagttcttctttcatatcggtaatgaaaagcttgcggcactccaatcccaggcggtcctgctcaaagagaatgtttccccgctcggtaacgataggattcagaccagtttcctttaccttatccacttccctacccgatttactgccacaaaggttgtaaatgctccggttttcctttcctaaaaaagaaagggtgaaatattcgttctcctccataaactcatacgtatagcgctcggaacgaataaagacaaacaccaccggcttgttccaaagccagccaatacctccccaactggcagtcatggtgttgaaatgttctttactgcctgccgtaaccagcatccactctttgcctatcacttcgaagaagttctcgcttaaatctttaattgctattgatttcataagtatattattaataagaaacacttaccggtatacccgtttcacgtatccgttccgcaatgcgatccagttcctcgcgggtggccttctgcaaatcatggtcgggcgtttcacggtcgatggtataaatcatcacttggcggggagcaatctccttgacagcttccagccagggaagaacaaatttatcggatgtattatccatatcttgtcctttataacttcctttgagaaacatggtctggataatgcagttccctttgaacgctttcatcccttctataatctcccggatggagtaatgtccggtaggacggtcaagtacacggacatactcttcatccaccgtatccagtttaaggatgttgttgtcaatcttgttcaaagcctcgaatacggcaggacgatgaataaaggtagaattgctcagtacgctcacctttgcattcggaaaatacttgtcgcgcaaggcaagtgtatcttctatgatttcggggaaacggggatgtgccgtcggttctccattaccggcaaaagtcagtacatccggtgtaggtccgttttgctgcatgtcccgcagacgggcttcaagggccgaacggacttcttcgcgcgtaggcaacggctgtttgggacgatggtcggcattgaagccacattcacagtaaatacagtcgaaagtgcatactttgccgtctgccggcaataaatttattcccaaagatactcccagacggcgagaatgaacgggaccgaatatgggagatggataaatgacagtcatactatttacgatttgacgatttacggtttgattaatgcttaaacaatcttaccgctccaaagttaagtgaaaactatggtatctagcaatgttcggcttgcaaaagtttacccataaaagaaaatattccctttataaagcatacatctcatgttaaaaaagtaaattatacattacattttatctattttacttgtttatatgtaaagtatacattacatttgcagataacatctaaatgcatagtattatgagaaagaactatttatttccaaccactttcagaaagataggttggtgtttatttgtcccattcgccatcacgtccttcatctgccttttcgacggcagcaatgaagattggttgaaggtaaacgcgttgtcagtaattccctggggtattatcaagaactctttattcgacgagttgagtatgatagggcttacggtttcactcttgttcatagctttctcaaaagaaaaggacgaagatgaatgcattgccaatattcgttcaaactctcttatctgggctaccataacagcgtattccctactgatagtatgcactatgctgatttatgacatgcaatatcttaattttgtatttatagacttgttcatgatattgtttctgttcatcataaagtacaacattgaactttataaatttaggaggagcaacaatgactaatacattaagggtagaaagagccatcaagcatatgacccaacagcaattggctgaagccataggagtgagccggcaaaccatcaatgccatagaatcgggaaagtatgtcccttccaccttgctgtcattgaaaatatcagagatattcggaaagactgtaaatgaaattttcatgttggaagaaagtgacagataaagagaagactctaaaaaactgttttaattttatttttcaggttgcctcagaagaaaactgaaataaaattaaaacagtttctaaaacttgatacgcagttgcatctgcaagtccgctttcctatttcccggtatctcatcattgcccgaaccaatcgtctccctatcctgataaaccgtctgtccgaatttggcaagaaacatgaagttcttactcaaatcatatcgcagatgagcggagtaacggaaccctttgccatagaaggaaggggtatagaaagtatataacaatccacgctcggaggcgtaaacacgcgaatcgtaatcgtccgtatgaaaccaggttccctgcacggaaactgacagagggaaggggaaagtgtacgagcaaaattgagtacactgataaccttgccgtctatcaaagcgatacccttccccatcctgctgacggaagtggttataatctattgtagtacgaaagatatatcttcccggcatataggtcagccgataacggagtttatggtgatagataggttcgataactgcaccgcttgtacccgtcacgtctctttctttctgtttgtaccgataattaaaatacatcgaaaggctctttcgaggagtataagtaacctgaaacatggcatccactccctttgagggcttacttatacggtatttccaccaaggaaaagaaaacatatccaatgaagcgaaaaacttccaccgggcgaaaggtgtggcctctgctgccagataccatccgttctcattctgcggcatactgctttcgccaaaggaacgcccaaacaaagtccaataatcatatgaataataccggtgaacaagtagcagatgataatcggaagaaagattatacttcagccggttcagcaacgcatagcctttactgccggttgccgcctcccccacccacaccaaacggcccagacgatacctataatccatgcccacgttatagaaattacttccatgaagattgtactttgcatacttgttcaaccgaggcttgtaaggacggtcgaaaaaatagtaaatccccgtcactcccaccttcagagagttcttttcataggtcatgttttcacctattacctgcaaggcaaaggcattcattttatctgcctccttctgcgtgcgatgcaaccctgtcttgtaaatggaagttatctcgccatcctccaccacaccgtccatggagcgatgcgaatagaaagccgaaatatccaagtaaggcaatactcccaccgttgccgccactccccggaaataattgtactcatcagtagaactatgcttacggatgcctccggtacgatattctgttgtagacatagagaatgtttttcctaaacgaaaatccgtactaagtaccagtccctgcccgaagctcagacggtaattgcccaatgccaaagccttcagccgccccagattctttatcagaaaatagaaagaatagtaatcatagccttttctgttgtgcagggcaaagaagggttctccggcatccttctctcccgtcacgcctatttggagataatctccataatgaaaattatagcgcaaagaatggtaaagggaaggtcccaggtaattcttctcatatcctttacggatatagaacggtacatccaaacgtgccaatgtttcgtgtttcccgtatttcagtatagattttaaagcaggataccccctacccgctttcactgcccgcacacagacaaagggcagcagtaggtcgatggtacgtttatccatctcctccaccagttgcaattcataaatggtctgcatctgtccgtatatatagacataagccagaagattctctatctgtatatccgtaagaaaaggaaactgctccaattgctgtttagtggcggcattgaggttgacaggctcttgcagacgtcgggacaactcctccaattcatcttcccaaccgtattcttcctcattcccgatggaaagttgttccaaattttcttccaaaagaagtaaaggctgttctttctgaaggccggatatattttgagcttcaagcataggagtcattgacagcatacttacaaaaactcctatcttgagtaattccattaatagtaggtcactttcatgttttgggaagcgaagttaccttaaataagttaattgagcaaggaaaaatcaacatgatgcaacaacattacacagaatggtgtacttttgcaacatgaacgcaaggcttaacatagtaatactcatcatgtttctttctctcggaagcctgaaatgttttgcacagcagcaaccacagtctgctgcgcaaaagagtgtctatcttactcccatgtgcgtttacgaaggagataccatcccttatgtcaagctccccactgtctacatcttcaagccgcttaaattcaagaacaagcgcgacatgaacaagtactacaaactcattcgtgacgtaaagaaggtacttcccatctccaaggagattaaccgtgccatcattgaaacctacgaatacatgatgaccctgcccaccgagaaagcccgccagaaacacatgaaagcagtagagaaaagcttgaaggagcaatacactccccgcatgaagaaacttacctttgcccaaggcaaactgttaataaaactggtagaccgacagaccaactccaccggatatgaactggtaaaagcttttatgggccctttcaaagccggtttctaccagacttttgccgcactcttcggcgccagtctaaagaagcaatacgaccctatgggagacgatgcattgaccgaacgggtgatattgatggtggaaagcggacaattataaactgatgtttattcccgccttgcgtgcctgcgaatgttgaaactggcgtttcacatcatatgtctttccgtctttgacaaacttagagccggtctgcttgaaccagaactccactttattttccacacaaattctgcgaaggtccatcacccattcaaaatcacaagggcgggcttcgtaaccggattctccccctgcaactatctgttcaatccattcgccaacagcataagtacttaaatctatcctttccagcagcggttcacagattattatcttatgctttatgggagccatcctatagatgggcaagcgataatcggcgcaagtctggttttcaaccgtacaacagatggttacattatcatatccgtctccccaatcatcgggcagacagtcagaaaaacggtctatacgcttggtaatcatcataaaatgcagatcactgcggtaacaaatcatctcccatgcttcggcccgccatttgtcagcatcttccacaaagaaatcggaagtaaagcaggtgtagacaaatgttccaggtggtatcttgaattctccgttacgctttttacgcaaaggcaggtcaaagttttttgtccgcaccaccaccgaactgtccacctctcgccgagcatcaccacgataaacataacaatacttacaacctgcactcaatttatggcaaccatgccataagttccacatcatcgacttcgcaacaataccgttcattcaaacaaaaaacttatagttaacaccatgttgaaaactatgttagcaacacaaataattagttattaaacaattgatattaagctatatattcagttaataacagaatgaacaattgtttattactacttattcgggttgtacctctcctgccatcggaagctctttccaaccttcaccaaatgcatcataagcatcggtaaccactacaaaagcctttgggtctacttcccttatcttctgcttgatacctaccacttccttgtaactcaccacaagaaacagcatttccttgtctacattggtataaagaccactactcttgatgcaagtggctgtacggtccaaatctttaagaatatagtcgtgcaaagcggtaaggcgcatatcactgatgacaaacagtatcttgtcattcttctccccatttatcacataggccaataccctcgaagtgacaaaaatagctatcagtgaatagaaagacaaatgccacgaaggttgtgtagcatcatccggatttccaataccgaaaccgataaccaataggccgaatcccaccacgatgccatctaccagcagtatcgcctttgaaaaacgtatatggcaatatttctgcaatatcatcgccacaatatccgtacctcctgtagtagcccggctacgcactacaataccacagcctataccgataaccaccgcaccaatcacagaagtcagcatcaaatggtcggacatattcagactgccacccagcaactgtgtagggtccaactgatggagcgcttcttcagaaggataggagaggagagacagcacattcatggcaagcggagtgaatagtgccgccacgatagtacgtgctcccaattttgctcccagtaccagcacggaaatgataagcaaaggaatatcaaacatataaccgaaagtacctacttgaatagaagggaacagattatgaagcacaatactggctccatacaccccgccaggaacaagattataaggattgataaagtaaacaaaacctgctgccagaatagtacaacctacaaaaatgcctatccatgaagatattatctttttcatatcgatatgatttatatatattcagcaaatatacaaaaaataagaaaagacaccaactgtacagcaagttttccacatacaaccgatatgtgttgaatacatggttaacaaaaaggatagattaggagataaagcattaatttacaatgaataaagtggttgatttttataatcaaccactgttcataaaatctctcatcatacctatatagctccaacaaacccgatatattgacagcttattaacagccctgttattatctcagtttcttgaataaatcccaaataacaatacccgccgtaaccgatacattcaacgaatgctttgtgccgtattgaggaatttcaatgcaaccgtgcgaatggtcaatcacttcttgttgaacacccttcacttcatttcccattaccacagcatactttttagtcttgtccagcaccagttcgtccagcatcacactaccttccgcctgctctacagaataaacaatgtatccctcggcttttaggttatcaacagcttcaacagagttatcaacatatttccaatctacggtaaattccgctcccaaagctgttttgtgcatctccggatggggtgggatagctgtaatgccacaaagataaatgcactcgatgcggaaagcatccgaagtacggaaaacggaacctatattatggagactgcggatattatccaataccactaccaaaggcagtttttcggcttccttaaattcctctacactaatacgattcagttcagttatcttcagtttacgcatgacaatatacttttaaatctccccgcaaagatacttttttccgtttatatcccggttaataaccgttgaaaaggtgtcaatacaatagggaaacaattttaaaaataatccttgcattattcaaaggtctgcatattacagcagtgaaacgaacaaaccaaaaaagttaaggagaattttccaggcttcattcaacatatttttcagcctagtttcatcggtttataactctaaagttattaactttgcatattattaacaacatgttaatgctgtttagcagaagtcttattatcaacggataaacttaaaaaacccggtttataagcataagagtaaaattcagcttgatactaataacttcataggcaagaaaaatcgtatttacttgtccacactgttaacagcctatcatcactatcaaaggatttttaaagaagaaagagaaattaaaaaatataattatggataatcttatagaagctatcaagcagctgaagaaggagaagaacgcaatcattctgggacactactaccagaaaggtgaaatacaagatatagccgattacgtgggcgacagtctggctttggcacaatgggcggcccggacggaggcggacatcatcgtgatgtgcggtgtgcatttcatgggagaaacggcaaaggtgctttgtcccgacaagaaggtgctggtgcccgatatggcggcaggctgttcgttggcagacagttgtccggcagacaaattcagtcagtttgtcaaagagcatcccggatatacggtgatatcctatgtgaacacaacggctgccgtaaaggcggtgaccgatgtggtggtaacttctaccaatgcaaagcagattgtggaaagcttccccaaagatgagaaaataatctttggcccagaccggaacttgggtaattatatcaactccattaccggaagaaatatgttattatgggatggcgcatgccatgtacacgaggaattctcggttgaaaagattgttgaaataaaacggcagcatcccgatgcggtggtactggcacatcccgaatgcaagagtacagtcttgaaactggccgatgtggtaggctctacggcagctttgctgaagtatgcagtggcacatcccgaaaagagctacattgtagctaccgaaagcggtatcctgcacgagatgcagaaacaatgcccgcagacaacatttattccggctcctcccaacgacagcacttgtgcctgcaatgaatgcagttacatgcggttgaatacactggaaaagctttatgattgtttgaaaaacgaatcaccagaaataaaggtggatgctgagattgcagaaaaagcagtgaaaccgattaagaggatgttggaaatatcggctcaactgggattataatgtgctgatatactaatgtgctaattggctgtgctgtcacgtcgaaaggtcattagcacattggcatatcattacatcaaaaacattatctcgttaagaacttacacaacttgttagtggccaatgctcggtgactgattttatttttcagttcattccccatttcggcaaaagtctgtgtatatccttcgggaatgaatatgggatcataaccgaatccagaagtaccttttctgttttttgtgatttctcctttcacgatgccctcaaacagatgttcctttccgtcgatgataagtacaaatacggtacggaattgtgctttccggttctcgatgccctccatatctttcagtaacttcttcatatttgcttccgaattgtgtgcatcgccggcataacgggcagaatgtacacccggtgccccaccaagggcctccacttccaaaccggtatcatcggcaaaacagtccagatgatagttatcgaagatatatcttgctttcagtaaagcatttccttcaagtgtgtctgcagtttccggaatgtcagtatcgcatttgatatccttcatgctgagaagttcgaccttctctcccaaaatggcagtcacttcttccagtttgtgtgaattgttggtggcaaatacaaatttctttctcatattatgttctccttatacttgtggcttatacaagtccctatttcacttttaaccggtcgaaaccttctccgtatacaccgatgacggaactttgggaaatgaaagcgttcggatctatatctttcaccattcggaatatttctaccgattgacgtttgtaggcaagcacgaccagcaccttcacgttgtgtttactgtaccagccgataccgtcgagtaccgttacaccgcgatgggtttctttggtgatgcgatcggcaatcctttcatattctttggagaaaataaagaattgaacagattgccgggtgctgttgacaatgtaatccagtacaaacccgatgacaaacaaagttacaaaaccaaatatcacacgtctccagtcatgaaataccacgtagcaggaactgatgatgatgaagtcacaggccattatcatgcgtcccagtgtgacatccttgtatttgtggatgatggctgcaataatatccgtacctcccgtgctaccgttacagttgaatacgatgcccaggccggcaccgcacattgcagcacctatcagacaagccatgaagtcttgtccttcgcccagcagttggggagggacaccatcgggaccattcaccaacagctggaaaaaccatagaaaaaaggtcagtccgaagatggcaaacgtggtcttgatactgaacttcggtccgagtatcttgatggcaaaagtcatcagtacggcattgatgatgaagtatgaccactggatgggaaatccagtggcataatagatgatggcaccaataccggtagtacctccggtcgtaatctggtaagggatgaggaaagctgcccatcccaatgcatagctgatgagccccaaagtgatgaagatataatccttcagttccctcgtcacttccgctttggttggttttgtaatttgcatatctgttatttaacaacgatgttcacaatcttctttggtactacgattactttggcaatggtcttgccttctatccatttttcagagcgttcgtcggccaatacagcagtctggatggcatccgatgccgcatctgcggggaattccatgttgaaccgtgcctttccattgaaggaaatggtgtagttgaccgtatcttccaccaggtattcttcgttgcatactggccacttggcatcgcatacagaacctgcattgttcagagtctcccacaattcttcgcatacatgcggagcaaagggagccagaacgatgatgaactggttcagaatttccttcttgctgcatttcatcccgaacaactcgtttacacaaatcatgaaagcactgatacttgtgttgtaagagaattgctcaatgtctcccgtcactttcttaatcagtttgtggagggatttcagttcttccttggtggcaggttcatctgttaccagataattgtcgttgcggtcgtagaacagtgaccagaacttcttgatgaagcggtgtacaccgtctattccgtttgtatcccatggctttgattgttctaccgggccgaggaacatttcgtacatgcggagagtgtcggcaccgtatttgtcgacaatcatatcgggattgacaacgttgaacatggacttactcatcttttccacagcccatccacagatgtacttgccgtcttccagaataaactcggcagttgcgtattcgggacgccatgctttgaaagcttcaaggtccagaacatcattggatacgatattcacatcgacgtggagtggggtagtatcgtactggtctttcagatttagggacacgaatgtattggtatctttgatgcgatagacaaaattgcttcgtccttgaatcatgccctgattcaccaacttttggaacggttcttcggctacggagatgccgaggtcgtataggaatttgttccagaaacgggagtatatcaagtgaccagttgcatgttcggtaccgcctacgtaaaggtctacattgtgccagtattcatctactttcttatccacaagtgcctggttgttgtgtgggtccatgtagcgcagataataggcgcttgaaccggcaaatccgggcatagtattgagttccagtgggaagacggtggtgttgtctatcttttcgttttccacaacacatttgttcacaatatcccaagcccattttgtggcatgtcccaatggaggttcaccggtttcggtaggcaggaatttggcaacttcgggtaattccaggggtagggcactttcatcaatcatataaggcatgttatccttgtagtaaaccgggaacggctcgccccaatagcgctgacgtgagaaaatggcatcacgcagacggaagttcacctttacacgtcccagattgtgctctttcacatatttcttggtagcagcaatcgcttctttgatggtcagtccgttcaatgaaaggtcacaatagggagtaacaccttctcgtggagagttgcatacaataccttccttggcatcgaagctttcttcgcttacatcgcaaccttctaccagcgggcggatttcgaggccgaagtgcttggcaaaagcatagtcacggctgtcgtgtgcaggcacagccatgatggcacccgtaccatatccggcaagcacatagtcgcttatccagatgggcactgcctcaccggtaaaggggttgagggcatagcttccggagaatacaccggtaacgctacggtcggtaatacgttcgcgttcagtacgttttttggtgcgttccagataagcgtttacttcatctttttgtatgtcggtggtaagttgtggtaccagttcgctttcgggagccaataccatgaaggtgacaccgaacatggtatctgcacgggtagtgaaaatagtgaattccaaatcactgtctttcactttgaattgtatctccgcaccttcactgcgtcctatccagtttttttgggtttctttcaaggattcggtccaatcaatggtatcgagtccatccaataagcgttgtgcataggcagatacacggagacaccattggcgcattttcttctggatgacagggaaaccgccgcgttcactgacaccgtctattacttcgtcattggcaagtacggtaccaagttgcggacaccagttaaccattgtttcgcctagataggcaatacggtagttcatcaggatttcctgctgttctttttcactcttggcattccattctgtggcggtaaaactcaattcctcgccacaagccacattcattccttcagtaccggtttggctgaatgcttcaatcagttcctggataggacgtgcctgctttttatcgttgcagtagtaactgttgaacattttgaggaacgcccattgggtccaatggtaatattccggttcgcaggtacgaatttcgcggttccaatcgaaagagaaacctatcttatctaactgttcacggtatcggttgatattgttgacggtcgtaattgcagggtgctgtcccgtttgtatggcatattgctctgctggaagaccgtaagcgtcatatcccatgggattcagtacattgaaaccttgcagtcgtttgtagcgggcgtaaatatccgaagcgatatatcccagcggatgacctacgtgcaatcccgcaccggaggggtaggggaacatgttcagcacatagaatttctttttcgtttcgtcttccgttacttggtaggttttgttttccacccaccttttctgccatttcttttcaatctccctgaaattgtattccatagtggtatttattaatattttgttgaaaacattgtttattccatggttaaaaccggttagtatccggttaatatcggtgcaaagttacgggtttattttcagatttgtagctaagtaacataaaaaacaatggcaaaggcttgataattcactttttattacttacatttgtgatgtgcttttaaaactaattttttgtttgtaatacaaataatagctaaattaattcaataggatatttactaaaagatttttaggatatagcgaaggatgaagtctgggaagatttcatccttcgcgttattgtgttgaagaagaaagtcgtatctttgcgcaacttatcggaagtgtatgaacgcaatgaaaaattatacttatcatattgtcgccgtccttacggtaggtatttggggtctgacttttatttcaacgaaagtattgattgggcatagcctttccccgcaggaaatattcttgcttcgtttcctgatagcttatctgggcatctggtttatttctccccgaaaactgtttgctgataattggaaagatgaatcttggctgtttttaggaggtatagcaggcggttcattttacttttttacggaaaatacagctttggagattacattggcgacgaatgtggcatttattgtctgtacggcaccattgctcacgaccattctttctttgtggatttataaaaaggaaaaggctacccgtggattgatggctggttctttgctggcgttggttggtgtggcattggtggtttataatggtagttttgtattaaagatttctcctttaggtgatttccttactttacttgcagctttttcctgggcattctatagtttaataatgagaaaaatgtccaactgttacagtataatttttattacccgtaagatatttttttatggggtattgactattcttcctgcatttctgattcatccctggaacttcgacattgtccgtcttctcgagccggctattttgttcaatttacttttcctgggtgtattggcttctttgatttgttttgtagtctggaacgtagtcttaaaacagctgggaacgataagagcttccaactatatttatctgaatcctctcttcactctggtaggttctgcttttctgcttggcgaacagcttactatagttgctttgatgggggcggtgctgatattgggaggagtatattgggcggaaaaaaagtaaaattctccttttctatgataaaattctatctttgtcttcaaaataataggcaagacgaaacttctttcggaagacgagtcggtaaccattaaaacagtgaaaggagtagggttgatagtaagcattcgaagaaatgcaccttttacactttgaggtttggttgtagctttgcggcagtgaatacaatcaaacctcaattattatgaacagacaagaatttgaagaattagaattgcaggtgcaacaaagcgagctgccgttgaagtcgtaccttcaacagataggtgtaagttattcaacctatcactactggcgtagaaaatgttccgttgacaggagcagtatcaaacacgagttggctcctatcagttttaaacaggcatttacggagtcttcccaagaagaacaattgccgcatggtgttgcgctgctgtttcccaatggacttcgtgcccacttcgggagcggttctgaagatttgctgaaggaaatatttacccaaagtcttcgagacggtcatgtttaacctgaacgacacgatgcgctacttcctgtgtcctggcaggacagatatgcgcaagggtatcagttcgctatgcggagtggtacatgagaaaatgaacagtgaagtgaggaacggtgatgtcttcatcttcatcggttccagccgcagactaatgaaactccttcatgccgaagacggaggtatggtaatgtatgtaaaacgtttggaggccggtcgcttcaagctgccggagtatgatcccaaatcaaacagctatcccatggagtggcgcgatctggtgatgatggttgaaggaatacaggaaaacccggaacagaggctccggcggttaagagccgaacgtaaggaataccatgtataacatgttttttgcgtgagtaaactttggatattgttgcataattcactgttaattagtatatttacatcattaaaagaagtatagacaatggaagaaaaagaaattttactcaagacgatagaagggctgaatgcctctatagcctcattgtctactactaataagaatcaatccgaacagataaaaaatctgcaggaacgtatcaaggagttgacggctcaggtcgcatggctgaaccgtcagctctttggtcgtaaatcagagaaacttcgcgtatatgatcctaatatgccagacctctttgccgacgagttttccggactccggcagcaggcggaagaaaagcgggacgaggctgtggaaaagattgagaaggaatcggtggaagacgtaaaacgaaatcgtcagaaccgcaaaatgatagaggacttgcccgtattggaaaccgatacaatagaaccgaaaggcgtagacttgtctttataccgtagaataggcgaagagataacaaaagtcgtcaaacacaagccgggaatgctttacgtcaaggtgatcatccgtcccaaatatgctctcaaggatagtaccctgcttcctccagccggacagaaaggcgtagagatagctcccatgccgctgatgccggtcgacaagtgcattgctgacaccagcctgcttaccgagatactgcttcagaagtatgaatatcatgtcccgttctaccgtcagatacagcaataccgccatcttggaatgaaaggccttaccgaaagtacactggacggctggttcaagaaaaccgtggaactgcttaagcctctgtatgaagaactcaaatgggaagtcttctcctgtgactatgtacaggcggatgaaactacagttccggtcattaacagagaaaaacacagagccgacaaggaatatctctggatggtaagatcagtcatggagaaactggtcatcttccattacgacgggggatcacgggccggagcggtcatcgaatccctggcaaatcaatataacttcaagggatatcttcaatgtgacggttttgcaggttatgaaacagccttcaagaccaaccccgacgtgcggctactcaactgcctggtgcatatacgccgtcattttgagcaggctttggatgaaaacagggagatggcgcaacatgcactgactcagatacagcatgtctataaaatagaacgccagtgtgacgaagccggcctgtcatatgatgagcgcagacagacgcgtcaggaactgtccaggccaatcatggaggcaatgaaggtatggatggagacagaaggaattaaatacagtccaagttctttgacaggcaaggccataacatatgcctataccaaatgggataatattatgagatgtctggacgatggccgcctgtactgggacaacaatctggcggaaaatgtccaacggcccatcactctgagcagaaaaaattttcttttctgtggtaatcacgaagctgcggttaatatgtctgtcatatgttctctgctggccacatgtaaggcgcacggggtaaatcccagggtatacctgaacgatgttatcgcacaaatgccttatcacaaaaaggcaacccaagaagaacttttgaatctacttccacataaatggaagttgaaacatccggaatgtgtactgacaaggcaaaaggaggaatcttgtaactgatataaattgtaacatatgggttcaacgtaagcattcgaagaaatgcaccttttacactttgaggtttggttgtagctttgcggcagtgaatacaatcaaacctcaattattatgaacagacaagaatttgaagaattagaattgcaggtgcaacaaagcgagctgccgttgaagtcgtaccttcaacagataggtgtaagttattcaacctatcactactggcgtagaaaatgttccgttgacaggagcagtatcaaacacgagttggctcctatcagttttaaacaggcatttacggagtcttcccaagaagaacaattgccgcatggtgttgcgctgctgtttcccaatggacttcgtgcccacttcgggagcggttctgaagatttgctgaaggaaatatttacccaaagtcttcgagacggtcatgtttaacctgaacgacacgatgcgctacttcctgtgtcctggcaggacagatatgcgcaagggtatcagttcgctatgcggagtggtacatgagaaaatgaacagtgaagtgaggaacggtgatgtcttcatcttcatcggttccagccgcagactaatgaaactccttcatgccgaagacggaggtatggtaatgtatgtaaaacgtctggaggccggtcgcttcaagctgccggagtatgatcccaaatcaaacagctatcccatggagtggcgcgatctggtgatgatggttgaaggaatacaggaaaacccggaacagaggctccggcggttaagagccgaacgtaaggaataccatgtataacatgttttttgcgtgagtaaactttggatattgttgcataattcactgttaattagtatatttacatcattaaaagaagtatagacaatggaagaaaaagaaattttactcaagacgatagaagggctgaatgcctctatagcctcattgtctactactaataagaatcaatccgaacagataaaaaatctgcaggaacgtatcaaggagttgacggctcaggtcgcatggctgaaccgtcagctctttggtcgtaaatcagagaaacttcgcgtatatgatcctaatatgccagacctctttgccgacgagttttccggactccggcagcaggcggaagaaaagcgggacgaggctgtggaaaagattgagaaggaatcggtggaagacgtaaaacgaaatcgtcagaaccgcaaaatgatagaggacttgcccgtattggaaaccgatacaatagaaccgaaaggcgtagacttgtctttataccgtagaataggcgaagagataacaaaagtcgtcaaacacaagccgggaatgctttacgtcaaggtgatcatccgtcccaaatatgctctcaaggatagtaccctgcttcctccagccggacagaaaggcgtagagatagctcccatgccgctgatgccggtcgacaagtgcattgctgacaccagcctgcttaccgagatactgcttcagaagtatgaatatcatgtcccgttctaccgtcagatacagcaataccgccatcttggaatgaaaggccttaccgaaagtacactggacggctggttcaagaaaaccgtggaactgcttaagcctctgtatgaagaactcaaatgggaagtcttctcctgtgactatgtacaggcggatgaaactacagttccggtcattaacagagaaaaacacagagccgacaaggaatatctctggatggtaagatcagtcatggagaaactggtcatcttccattacgacgggggatcacgggccggagcggtcatcgaatccctggcaaatcaatataacttcaagggatatcttcaatgtgacggttttgcaggttatgaaacagccttcaagaccaaccccgacgtgcggctactcaactgcctggtgcatatacgccgtcattttgagcaggctttggatgaaaacagggagatggcgcaacatgcactgactcagatacagcatgtctataaaatagaacgccagtgtgacgaagccggcctgtcatatgatgagcgcagacagacgcgtcaggaactgtccaggccaatcatggaggcaatgaaggtatggatggagacagaaggaattaaatacagtccaagttctttgacaggcaaggccataacatatgcctataccaaatgggataatattatgagatgtctggacgatggccgcctgtactgggacaacaatctggcggaaaatgtccaacggcccatcactctgagcagaaaaaattttcttttctgtggtaatcacgaagctgcggttaatatgtctgtcatatgttctctgctggccacatgtaaggcgcacggggtaaatcccagggtatacctgaacgatgttatcgcacaaatgccttatcacaaaaaggcaacccaagaagaacttttgaatctacttccacataaatggaagttgaaacatccggaatgtgtactgacaaggcaaaaggaggaatcttgtaactgatataaattgtaacatatgggttcaacaaaacaatagcggctgatactattaggttcatagtgacagtcgctattgttgtatataaaggtttaatacctgtagttggccgaatacttacggttgatattgatagaaaattaataatgtattcttctatattgtaataatttagcagtatatgtactgctcttctgatttattttcgttatttttgtatagcagtattatgaatataaataaggagggtatatgtgtataaaacggaaagtcaatatttcttgtcttgatgtccgtttgggaatctgcctgctgttggcttttgtgccgcagttgctttttgcgcaggaagacagtgtacgtttcattcgtgacagtatacagatacagccagaattcaatgaatctctattctctccttttgagcttccctctggaaactttgccccttcttctatgtttcatccggaacactcctattctctgcccgatttttcactgaaagagtctcttcgtctgccttatcagaccaatccttctctgctatttcggggagattacagcgcaagtggtgtattaagacagttccctcacggtatgttattcggttctggtgggcagaccagcgtaccgggtatcggacgtttcaacaatgcttccctgggatatcagcacgcctttaaccaaaggctgacgcttcagcttggcgtagatgccatgaagataaatatgattcattccaccgggcaggctttcagtacttcgggagttttgcggtatcaggcttcggaccgtgtaacttttaaagttttcggttcgtatgccataggaaatccttatgggatggatacccaccattatggtgccaccatatcgctagatatgtccgaacgttttgggatggaagtcggggtacaacgttattacgatgcttatcgcggtcgttgggagacggtgcccgtggtgattccttattataaattagacaagtttaaattaagtctggacatgggcggaattttgtatgagattctgcgtaatgtcgtttttcctgataaaatgaactccggtgggccgacacttgccccaccacgttttcagatgccaccgttacgataaagcaagtatcaatccacttatttctccagcaccggggaaccctgccttccccggtgccggagaaatgggcagagttttttgaatgaaagaaccgtggtattacgaagacttttcctcctttttattagccttttccagagattctcattaaatttgtgctcaaactcaaataattcgacgacgaaacgttacaccatcactaccttacttgtggcactgtggtgtatcagcttgtgtgcccgtacccaaaaagcagtctatatcgtcatagacggagttcctgccgaccagatagagcgcttgcacacacccgctgtcttcgacatcgcttcaagaggcgcatatgcccgggcatataccggtggagaaataggcacttactcgcaaacgcccattatatcggccatcggttacaccaatctgctgacagccacctggctgaacaagcataatgtgggaggcaatgacaacctacagcccaattacaactattggaccattttccgcatcgccaaggagcagtcgcgtccggtgaagaccggactctactcgagctggatcgacaaccgtactgtgctcataggagagagcaaggaggagacaggccgcttgaagatagactacgtcagtgacggttacgatctcgataaagtccgctttccgcacaaggagaaggatttgcatgtattcgactacgacgaacaagtatccaaggatgctgccgagagcatccgccgggatgcacccgacctcagttggttttatctgtggtacaccgatgatgcaggccatatagagggcaacggcgaattcttcgatgcgtatgtgcgcaaagccgacgagcaggtggcacgcgtatgggaaattgtgaagtatcgcgaagagcatttcgatgaagagtggatggtagtggtcaccaccgaccacggtcgcactgaaaacggctacggacatgggagccagtccgagcgcgagcacaccacctggatttcgaccaacgtgccggtcaatgcgcatttcgcagaccgtaatctggccataaccgacatagctccgtctctcagccgctaccttggtttcgaggtgccttcggatgtcctttgggagcaggatggcattcctttcatcggtcggacagacatctgcgacttgaagaccatgccttatgacgacaccgtgaccttgtcatggcgcacttacgcggagtaagtgccggtcaccgtctacgctgctacgactaatcatttcaagaccggaagcaaggacaattacatcgagcttgccaagttgcccgccggcaccacttcctatacggtaaatctgaaagaacttccccactcgaaattctataaattcgtagtagttgctcctcataatcatttgaatcgttggttcatgaaatagagaaatacccctgctacaaatagctgtagcaggagtaaattccataaagagagagttctgatacatactcgaacttttctagttggaggtattatgacatccttaatgtatatcttttatccatggacctctgtccgtgccagttccacaaatctttttctgagttcttccgtatagaaccgtgtatctcccgattccaagtgcccgttcgtgttccaaagctggaagaagtaggcatcatggcattggacgatgtgatcgtgctggatggtgaagtgctctccctcctgctgcaagggtagtctgcccaatagggagttgtatagtgactttgttgtccgcatatcgtccgtttctttgtcatatagggtgaaatactcgttttccgcatcttcgaattgcatcaacagataccttttcgactgctggatacggtctatccctgtcacataattatcctggaagacggtttgtagggcagtggttccgtcaccatcgatatactgctggggcagtcaccggtttccgaaatctaccttgtaccgtagggagatgctgtcgtctttcagcttgtacacttcgtcgtaaggatagaaccacaacagcgcttcttcatcagtaggtatccaggctccattcccgttgccgtcgtccgcctcctcttagaagggaagatgcttttccagcttgtcaccctccttcaggtccagtgcgaacagatgataacagccttcgtgtgtccggttgctgttgggcagatagagcttgtcgcctatgcagaacaaatcttccgtccatataccgtcggctggtttttcgcgcaggaaccgcccttctgcatcgaagaagaaaaacttgcccaggaaatggtcgaatatcaccatttccgtcccatgtacggcgaagcaggagatatgggtgtactcgcccggtccgttgcccacccggtggatgtcggcttgcagcttgctggtggtgtcgaacacgaacacgcgcttgccaagattgtccgctatataaatcaggtcgttctgatagattagtttcgtgacttcgccaatcaggcactcattcgttgcttcgagctgaaacatcaggatgctgtcttccaccatcggcgcataatccagcttgtcgctgatgtgtttccagtctatttgcagcacctggatgcctgtatttgcgggctttatcccgccgctgtgcgtgcacccggcgaggacaagagccaacagatagaaaatgtatttttttatgtagcaaaataatggttgattatacttattcctcggatacggattcgccggaaccatacttcattgtcttcccctctttcgacaaggaaggcggcactgctcctttcgatactccccggcgataattgggtttgctgctcatcacgaaccgcagcttcactccgttgcggatatcctcatacgtcaggtaggatttgtcatgcttcttgccgtttacgtacagctctttcacatatacattccgtggagaccagttgtcggcctgcatctctatcagcttgccgttgctcatcttcacgctggcggcctccaggcaaggcgagccgatgttgtagacattgcttgagggcgctaccggatagaatcccagacagttgaacaaataccatgccgacatttgtccgcagtcgtcattcccgctcagcgcatcgggtgtgttgccatagaagcggtctacgatggcacgcacccactgctggcatttccaaggctctcttaagtaattgtagagataagccacatggtgacaaggctcgttgccgtgccagtaagctccgatacggccttgaatgtcgtgtgctccgggaatatcctcaggcaactccacggtgaacagctcgtcgaggcgcttcttgaacaactcctttcctgccagattgatgtacccttgcacgtcttggggtacataccaagtgtattgcactgtgaatccttccgtgatatcgccccagccgtgcaccgagccgggaccttgataggctacgggagtgaacggtgtgcgccactggccccggctgtcgcgtccgcgcatgtatttggtctcggggtcaatcagtgtctggtaggagagggcacggttcaggaagtagcgataatcctcttccttgcccagcttgcgggctgcctgtgcgatgcaatagtcgtcgtaggcatactccaaggtcttcgataccgattctgcctccttgtcgaagggtacatagcccagttcgcgatactccggtagacagtcgtagtggggattcatcgccgtagtcttcatggcttcgtaggcgcgctcgtagttgaagcccggcacttccttcacaatcatgtccgccagcaccgatacggcgtgatagcctatcatgcaccacgtctcgttgccgtagaacgaccagacgggcagcatccgctccacgcttttgtcatagtgtgccagcatggagttggcaatgtcggcgttcacgtcctgatgcaccaggttgaaccagggatgcagggcgcggtacgtatcccacagcgagaagacggtatagttcgtaaatccttcggccttctcgatgttcttgtccagcccgcgaaagctgccgtcggcatcctggaagatgaacgggtgcagggcggcgtggtaggccgaggtatagaacgtttccttggtcttgcggtcggcagtgagggtatatttgctcagttcctcttcccacaactcttcgccccgggttttcagggcattgaaggtcaggccgtccagttcgcggaggttgcgtgcggctccgtcggtgctgacggcagagatggcggtcttcacggtcacttcctctccctctcgggtggcgaaggagatgcaggccaccaggttcttgccccatgcctcgcggtcgctgcggaagcgcgaggtgttgtagattaccggttttccatcctgcatgatgcgcagtccgtccagtttcttcgagaaggtggcggtgaagtagacatggcgttcggggccccagcctttcaccagcttgtagccggtcagtgtggagtcgttcaccatgcgcagattggcccattcgcacgactgccacagcgtatggttcaagtcgatgaggataaacgctttctccgctttgggataggtgaagcggaacatgccgctacgcaggcccgaggtcatttcggccttcaccccgtagtcgtccaagtgtacggtgtagtaattgggcgtggcctgttcgcgttcgtgcgagtagcgcgagcggtagccttcgtcgggattctcgggtgtgccgggagtgagcttcgcctcgcccgtgccgggcatgaagagaaagtcgcccaggtcggggatgcccgtaccgctcaggtgggtcagactgaagcccatcagcgaggtgtggttatacttatagcccgaggccgcatcgtagaagcggtggttcgtgtccgggcttatctggatacctccgaagggaatctgggcaccgggatagacgttgccgtagccgtcggtacccacgaaaggattcacgtaatcgatgagcttctcagattgggcgatgcccggcgcggagagcgccaggcatgccagtgtgaatcctaaaaactgttttttacctttcttgtccattgttcatagtctgtttgtatgtgttatgcttcgatgtctcctatggccacctggtactcatgccacaggtcgtcaatattgtatttttcgcccaagacgtgcttgatggcaccgtcgaacgaccagggcaccacctcgagcgtgctgcggttgaacttgcgcaggaactcggggtccttgttgtcgcgcagccatacgaagaagtagcccgctttccggtaaccgtccatgtagttgccgcctttggggcgtccatcaggaccaaagccgccgttggccacgcgcacagcatcggccatgccctcgatgaatgcccagaccacgcggttggtaccatacgagccgatgccttgcggttccagctggtaggcgtgggtcagttcgtgcagcagcacgccgcgggtctcgaagaagagttttgcggtatcggcttcggcaaatgatttttcgatgtggcgcgtgctgtagaagatggtcacgtcaccgttactgcctcccttggcggagatgccgtcgatgtcttccagcgtatagtggatgttgtgcaccggtgcgatgctgtcttcgggcgaggcatagagcgtggccagcacggtgcgtgcctgttccttgatgtacgattcggcatcgggaatgatgcggtgatagatgtccgaaccggccgattcgggtgctttgtcttcgaagaggatagtgccgacgttgtaatcgttccagtcggtcggtttggctgcagtttgtgtatgttgctggcacgcgtaggtgccgaaggcggctgccaggcaggcagtgtagagcagatttcttgttttcatatcttttgagtttttaagttgtcggttgaagtttcgcaagttcttatactgttgataagcagtggcttctcaattctcctcctttccgtccgtcagtgagtaaggcttcgcgttggtggcggtgcctcggcgcttgttgggcgaagcggccatcttgaattcccatacgccaccctccaataggtcgctgtggctgatgtacatgttgccgtattccttgccgttgatgcgcagcgactgcacgtagcgcttcttgtcacttacaccgggtgctttgatttccagtgtcttgccgttgggaagttctagtttcaggtagggcaggtagggagcgcccagcacatattgattcgtacccgggcatacgggatagaatcccatcaccgagaagagataccaggccgacatctgcccgcagtcatcgttgccgcccaagccgttgatgtcgttccgatacatcttgtttaggatttcgcgcagccagtactgcgtcttccagggttgcgaggtccaggcgtagaggtagggcacgtggtggctcggctcgttgccgtggacgtagccgcctacaaggcattcggcagtgatgtcttcattgtgctcatagtacttctcgggcaggtgcatggcgaagagtttgtccagcttctccatgaactgcttttcacctcccatcacttgcatcagtcccagcacgtcgtggggcacgtggaaggagaagttccaggagtttccttcgatgaagccttcgccgtaggtttgcaatacgtcgaactcctgcttgaaggagccgtctgccaggcgcgggcgggcgaagccgatggaaggatcgtacaggttgcggtagttgagggcgcgcttgcgatacacgtccgccagttcgcggtggcctgctttcagggctgcccggtagatggtgaagtcatcgtaggcatactccagcgtactggaggcagccgtaccgctcttttccaaggggatgtagcccagttttatgtagtcggccaccccttcatagtagggcacggtagaggtactgaccatcgccttgagggcttcgtcggtttcgcctttcaagacgtcctttaccaaggcgtccgatacggccgacactccgtgatagccgctcatgcaccagttctcgttgcccatcaggctccacacgggcaacatgccgtgtacactctgccgggcgtgggcaatcatcgacttcaccatgtccgcattgcggtcgggcttcaccaggttgaggaagggatgcagggcgcggtacgtgtcccaaagggagaagatggtatagttggtgaatctgtcggcacggtggatgttgtggtcgagtccgcggtactggccgtccacgtccatgtagaccgaaggattaatcatggtgtggtagagcgaggtatagaacatcgctttctgatctgctgtgccttccacggtgaagtggcgcagttcgcggttccagctttcgcgggcttcgtcggccagctgttcgaagctcttgccggcggcttcggcgcgcaggttcttcagggcgccttcggtgctgacagcagagagggccactttgactacgagctcgctgttctgccgggtgtcgaaatggaagtaggagacgattttcctgccggtgatttcggggaagttcttctccagcttgaagcggcgccagaagccgttgtacttcacgggttccaagtcacggtagccgtagtctcgtatgggctgcgagagggagatggcgaagtaggtgtaattggtgcgcgcccatccgttggtaatgcggtagccagtcagcagggtgtcgttctccacgcgcaggttggcccagagcactttgccgttgtagttgtagatgccgtgcgttaggtccagtacgaggtgcccggcttcgccccaagggaaggtgtatttgtgtatgcctacccgttgcgtggcggtgagctggacacgtatgccatggtcggccaaggtcacttcgtagtatccgggcgtagacttctcggtggcgtggtcgtagcgcgagcggtagccctcgttgggagtggcggcacgtccgggagtgagtttcgggctgccggtggcgggcatcagcaggatgtcgcccaggtcggagtggcccgtgccgctcaggtgcgtgtggctgaagccgacgatggtggagtcgctgtactgatagccggcacaatactcgtaggccttgccctgataccgtccgtccacgttgtgcgggatggtatcggtgtccgggctgagctgtatcagcccgaagggagtgcaggccccggggaaggtgtgtcccatgccattggtgccgatgatggggttgacatagtcggcaggctgctgggccgctacttgcagggtcgcggctgtcagcaggatgatgaatgttttaatcttcatgatgatgtggttaagaatgtttttgtcatttatgacttgttactcattgctgagtgaatacggaaaatcgctctccttcacgccgcgcgtcttgttcggacggctgtccatgttgaaggtcagcttgccaccgcgcagcaactcgaagtggtcgaggtagtttttggtatagttcttcccgttgtagttgagggaacggatatagcggttttcatcactgtttttcggggcggagatttcaagttttttgccgttttccagttgcagcgtcaccttcttgaagtagggggcaccgagcacgtactggtcgcttccggggcagacggggtagaatcccagtgcggtgaacacataccaggccgaggtctgtccgttgtcctcgtcgccgcagtagccgtccggtgtgggcaggtagaggcggttcatggtttcgcgcagccagtattgggctttccagggctgtccggcgtagttgtaaaggtaaatcatgtgctgtatgggctggttgccgtgggcatagtttcccatgccggctatctccatctcgcgtatttcgtggatgacaccgccgtagtagctgtcgtcgaagacggggggcaggctgaacacggagtcgagcatggcggtgaacgtctgcttgccgcccatcaggtcgatgagtccctgtacgtcgtggaagacggaccaggtgtagtgccaagagttgccttcggtgaaggcgtcgccccacttgaaggggttgaacggtgcctggaaggtgccatcggcgttgcgtccgcgcatcaggcgggtttcggggtcgaacacgttgcggtagttgcggctgcgttgcttgtagagttccagctcctgggcgggtcggcccaggagctgtcccatgcggtagatgcaccagtcgtcgtaggcatactccagcgtacgtgccacgttttcgtttatcttcacatcgtagggcacatagcccagcttgttgtagtgttcgtagccgtatcggcccgtgctggcaatgcgggggtgtacgctgttggctccgtgcagcagtccttcgtacatcttttgtgcatcggccttggtgatgttctttatgaaggcgtcggccaccacggaggcagagttgttgcccaccatgcagcctcggtgcccggggctggcccattcggggaagaatccgctttcaagataggtgttcagcagtccttcctgcatcttctcgcccatggaggggaagacgaggttgacgaaggggaagaggcagcggaacgtgtcccagaagccggtgtcggtaaagaggtgtcccggtagcacctgtccgttgtaggggctgtagtgcacggtttcgccttgggcgtttacttcgtgaaacatgcgtgggaagagcaccgagcgatacatgcaagagtagaacgtgcgcaggcggtcggtgttgtcatcctccacgcggatgcgcccaaggatgtcgttccatgcgcggcggccttcttccttggtctggtcgaagctcttgacgcctatctccttcaggttcagttccgcttgttcggggctgatgaacgaggaggccacgcgggcatgtacctgttcgcctttcttggtggagaagccgatggcggcacctacgtggttggattgcagttcgaggtgtttctccacggtatgatagtcagcccacactttgttgaaggtgaaaggcttgtcgaagacgatgacgaagtagttgcggaaattctggggcacgcctccgctgttgcgtgtggtgtagcctacgattttctgctcttcggggatgaccttgatgtacgagcctcggtcgaaggcgtccaccaccacgtatgccttgtctgcctggggaaaggtgaagcggaagtaggcgcaacgctccgtaggggtgatttcggtagtgaggttgtattcggacagatagacgctgtagtagtggggcatcgctttttccgccttgtgcgagaaccacgaggcgcgctgctcctggtctatcttcagccggccggtcatgggcatgatggagaattgtccgtagtcattgatccacggactgggttgatgggtctgcttgaagccgcggattttgtccgaggtgtaggtataagcccatccgtcgcccatctttccggtctggggcatccagaagttcatgccccaggggcgggcgatggcggggtaggtgtttccgttggagagtgatatcttggagtcggtgcccatcagcgggttgacgtagtccaccggctctttctgctgtgcatgccctgcaaggatggaagtcgctacggtaagtgcaaggattattttcttgtagttcataggaatgaggttgataatgtgaatactttggggagagatgtttgagtactgattaagtggattttgtttcatttatccgcttaatcagcatttacatatttgcttttttattggaacttaaaccatccgtttcctgccggctggatgaagtacgtatttccgtccttctcccatacccagagcccactttcgcagaagagcaggtcgatgaggggcttgaattgttcttttgcgagattcacgtcgttgccatagccgccgaagggagtagtgatggcggtgtttctgaaaagcacgcacgagtttccgttattggcggctgcgttcagctcgaagaagacatagtgccacttgcctgcatcttcatcgctgatgctgcccgggcagatgacgaggttgcgcggcgagcggttgtccatctcgagttgcgactcgggcatcagcgagaggtcgaggctgcttgccttggcatcgatgatgtgggtgttccagttgcccatgtaggcatctgtccaggaggcgcctgcgttgaaatcgaagacgaggctggcgttgccgatgacgggctgtgtggcaccgtcgtagtcgtaagtgatgcttttcagagcgtgtcccttgatgtccagacccggggcggtgactacgccgaggcggtcatcctccacgttgagcacgagggcatggttggtgtgcaccaccttgccgtccgcgatgtcggtgagttgcatggaccagttgttgtcgttgtccgagctcagtgtataataggccagtatatcgcctcccttctcacggatggctccgcagctgatgttctcgagggcctccacgcggtggaggatggcagccttggtctcacggttcgcggcaaggtcggccgtggtgacgggcgagaggttcatggtgagtccgtgggcctgtcctgtggctgcaatgaggtcggaggcatagctgctgataaggaatgtggattcctggttgttcttgaggtattgcagcgaggtgtttcctgccaaggtcagcagcacggtctgttcgcccttgaagtcgaggtggtattgtgcctccagttcggggcggagtatcttttcgtttgtgttggtgatgacgtttccgttttcgtcgaactgcaggtagaagtccacgccttcgtaggagagtttccagccgtcggcggcgcagagtagtttcttcacttccgaggggcggaggcgggtttcttcgttcatggttccctggtcttcccagtctttccatacgtcggtggtgccgcagccgcaaagggcgaagaggcacgaggcgagtagtgtgtatcttatctttttcattgtttttcgttttagaatgttgtttttcggtagtttattcagaaagcccgcggtgcaagcacggcgcgcgggatgcgcatgggtaccggtgcatacgagggtggcgtataaggcatcatcgtgccttgtgaggcgtatcctttggcggctccgggcgagcagatgcgcaggtcgatgatgggcggtatcacaccatcgtcctcaatctgcagcagtccgtcttctttgccgtcgctgtagccgcccgagatgagcgggagtagtccccaggggttgcgcatcacgaagaggtacttgttcgagggcggcagcaggaagttgtaggcgtggaagttcaccgacttgtattttccgtcgatgggcttgtctccgtccttaaatccgcctatcaccagctggcgctgcatcacgagtgacactacggcgcgtttcatatccttgcctgacagtacgccgggggcaaacgaataggtgttaccgcttccggtgaggatggcagctacgtattccgtggcgatgccgttgatgctcgacgagcctttatagacttgcagccacttgatgagtgctttctctatgatggtggcccaggtcacgttgttcgtcttgcccgagcaggcgcccagtttgttgccgtcggccacgaagtagttgtctacgcacacttccaccggtttccccatggggtcgaagaggctgacggcatacgtgttgccttccttttccttcagcatgctccggatgtatttgggataggtgtatgccaggtcggccataacagccaatgcgcaacagtctcctatgctatgctggttgatgtcggcaggcagtgggtcgccgaaggggtagatggagcctgccacgtcaaacgttttccatgccagtccgtcgaatgtctccggctgtgcggtagcgtttttcagccattccaaatcttgggcggatgccttgcggtcgctctcgtggatggtgcccatgggagtgatttgcgaggcggtcttcccgcctgccaagcggagcaggtcgtctatgttctcgcccgtgcttgcggcggcagacagagtccattcggctatctgggtgctttcgcttccggcattttgcttcacgttgagacggtagtaacggtaggtcacgttgttttccacttcatactccttcttctccttgcgcgagccgaaggtctggtcgctgcgcgagtctatcgtcttccacgtcttgctgtcggtggagccttccagcgtccatgccttggggtccatttccggagcgtcgtcggcagaggtgagcgagtaggagagtacggccacgttgctgttgccgttccaggtgatgctgaagctgttgtggcgcgtgcagtatttcgtgcccgcatctccgtccactagcttggctatggagcaggcctcgggtgcgtccgagtattgtgccactacagttccgccgcagggcatgttgcggttttccgcgggcagcgagtggtaaggcgacgagttgtcgcccttgttttctccgcccggtccatctccgctgtccgaggagcacgccggcatgcccgtaagcaatgccgccgcgctcaggatagagaaagtgaacaatcgtatggatttcagtcttatcatctgttatgattttagttgttcgtttctcgttcttattcctggctctctcccgtctctgcgttccagcccaggttctgtaccatcttcgggttacgacggatctcctggtcggggatggggaagaggtagtggcgtttgttgaagacacgtgtctcggtcactactttctcgaagaaggcggggaagtctgccttggaattcatgccgtggatgtctccgccttcaccgccacggtggtaagagggataaatccagtcgtcacccacggccatgtcggccaccttccagcggcgcacgtcgtagtagtagttccattcgtaggccagctcgatgaggcgctcgcgacggatgcgcttgtccacgttgtcgcggtcggcaggataggtgaggaagtcgtaaccgttggcatccttgccgcccttgttgccgtagcccggcacaccggcgcgtgcacgtaccagattcacttgctgcatggctccttcatagtcgccgcaggcactcaatgcctcggcatagcccagatacatgtcggccaggcgcaacaggttggcgcagtgcttgccgctccatacgccgttgatgggagccatcttgcgtacgccatatccctctaccggggcgtcgtgtccggctttgttgaagcctgagttgccgttcaggctgaacacggaggtaatcttgccctggttggtgtcgtctttcacccaggtggagccgttgaaggtgatgttggcatagaagcgcgcctcgcggtttttccattgtttcagtacgtagttgggttcgttttctttctcgttgcgtgccaggaagtagttgcgtgcgggattcatcgggttattgtagtcctcggtcacggtgtacatgtcggccgaggggatgccgtcgtattccttgtagtcggggtcgtccacaatgcgcacacccttgtccgtaaagaagaggtctaccatctcttgcgtggtgccgaatcccagaccgccgcggatggagctttcgctcgataggtgtgcgtggtagggggtcacttcgtaagtatggtcgctgtggtctgccagacggatgaaaatctgctctttgttgtcatcgccgtagtgtacgccgtctgtaacttggcggtacgattcatagaagtctactgggccattgctgcctgatacggtgtagagcttgtactggctgccgaattggttgaagaagtcggcgtatgcctgccgtgcggcttcccacttggcttgtgagtattcttgcgggaagagctgcttgccgtctttgttgcgtatttcggcataatcgctgttgccgttgaagagcgggctggcggcgtaaagaagtactttcgctttgaaagccttgcaggcgcctttgtcgatgcgtcccaggttggagccgttgtagcggtcgggcaggtcttgagctgcgaggtcgagctcggcagtgatgtagtcgatgcattcgtctacggagttacgctctttcagcagttcttcgagcggggtgtccagtgccagggcatcttctcctaagagcactaccggcccgtacatgcggaagaggtagaagtagtagagggcgcgcagggcacgggcctgtgctttccacaccaggcggtcgttggcgctggcttcggcacagcggtccacgttggcaatgaaggagcttgccttggagatgcctttgtagtaattgatgaaccagaagttgatccagctggacgaagcgtaggtcatacccatggtccactcgttgctggaatgccagctccaggtgatgttggcttcgagcgaggcaccggtaacaatggtacccggctggtcggagtagttggtgctgtagcgttctctggtttcgtcgggcacgtagctgtatacgttgttcagaaactgttcggttttctgacggttggtgaaggtgtcttccatgtcatactgttcgccgggtatggcatcgaagaagtcgttgcatgagctcaatcctacggacatcagcagtcccagagctcctatcttgaatatatttttcatgagttttcttgtttgttttgacgggtggattagaaattcacgttcactcctatggaataggtgcgcgagttggggtacgacgtaccgttgttggtgttcaactctggatcccacagcttgaacttcgagaaggtgagcaggttggtacccatcacgtagattcgtgcgttcttgatgaacgtcttgttaagccatgccttgggcaagttgtaggcaacggtcatctgcttgaggcgcaggaagctgacgtccttctgccaccaggtactggtcttggtgttgttctcattggccgtggcaccgtattgcaggcgcggatagaacacatcctggttggtggggtcgtcggccgaccagcggtcaccgatgttgtcgtagaggttagagtagcccgatgtatcggcaaaggggtggatggcgttgcccgagaggcagcggtcggcctttgcggtacccgagaagagggcgccgatggagaagttacccatctgcaggtcggcaccgaagccgtagtagattttgggcacgtcgccttggccgatgaggcagcggtcgtagtcgtcgatgacgccgtcaccgttcaggtctttgtatttcacgtcgcccggacgggatacttgtcccggatattcttcaccgaactgcttggcatggtccatgatttcttcttcgctggtgaaaaggccttcggcaatccatccccagcggccgttcacgttggtgccgcggcgttccagccaaggatatacggctgcggggtcgtcattctcgatgatttcgtcttcattccaggagatgtttccgcgtacggtcaggaaggtactcttgcccagttgctgcatgtattccagcgtggcttcgatacctttgttatccacgatacccaggttgccgtaaggcatttcaatgaatcctgcatagtcggggatggtggcacgctgcaggaagatgtccttgcggtgctccttgaagaggtctaccgacacggagaggttgtcgttcaggaatttcaggtcgatacctaggtcttgcttgcgtgaggtagaccatcctacgttggctccgtacttggagaagccccatccgcctacaccgtcgttgttcacaccgaagcggtagccgcctgtgcttcccatctggtcgaggtacatgaagcggcggttggtaacggcgtccgtacctacaagaccgtcggtatagcgtactttgaagtaagagacgtatttctgcaacggttgccagaaatcttcgttggagatggcccagcccacaccgaatgcagggaacagaccgaaacgtttctgcgggctgaagttctcagaaccgttgtaacccatgttcacttcaaagaagtagcggtcgttccaggagtaggttccgcgaagggcgatgccttgttgcttgtagggtagtgaacctaccagggtaccattgtcgtctttggagaggttctggctggtacggtagttcttctggctataaaggaaaagcccgcctacgcgatgcaggccgaaggagcggtcgtagttgagcgaagcctcgaaataagtgctgcggttatccgaagaagactgctcgaaactcagttcgtggtttccttgataggtacggttcaagcggtattcgccgttggcgtcgaatacatcttcgttccacaagccggtttcgctgtctttggagccggcaaagtagtaggtgtcttcgcgtttcttatagtagagattgcgtgagttgttcacgtcgaaagctatcatggctgtggcgctcagtcccttgctccacttccagaagccgaggtcttgtgtcacgcggatgttggagttgagctgattgcgtgcttcgttggtatatccgcggcgtgtcaggtcggcgtatggattacggaagtcaccgttggacgatatgccggggacagaaccgtcgggcatcaacttggggaaatagaccgggttgatgtccatagctgccgagaaaaggctggaggtggactgctgcgggtagtttccttgtgcgaggtagccgctgaagcccaggtcgatggtggtggtctcggtgggtttcaggttgaggttggcggtgtaattgtagcggtcgtagcgcatgttggcatcatagttctccatttgtgcggtacgtgtcaggcctcgttcgttgtagtagctcagtgagacgtagtaagtggcattgggcacaccgccgcgcacgctcatgttcacacgacggttgtggcccaggtcgttgaagagctcgtccatccagttgacggccggatagaggtattggttgaacatcgtggggttgtcgttcggcagcagaccgttggccttcttcgtggcctcgatgtactgcgaggtatagagcagacgtccgttggtgttcatgttcgcttcgttggcggcatccatataggtataggcatcggccagttggggacgcttggtcagggtgacgaatccttcgtagtagtcgaggttgaactgcggtttgcccacctttcccggcttggtcttgatgataactacaccgttggcgccacgcacaccgtaaacggccgtggcagaggcgtctttcagtacggtgaacgattcgatgtcttcggggtcgatgttgctgaagctacgttccacaccgtctaccagtaccagcggtttggtgttctggttggtgaaggtggagataccgcgaatccagatgtcggaatcgtcgtgtcccggctcacccgtgcgttgcacggctaccacacctgccagacggcctgcgatggaggaggagaggttggcggtgggcatcttgatgtcatccatcttcatggacgactgtgcacctaccacggacactttacgttggtgtccataggccactaccactacttcgtccagtgccgatacgtcttcggcaagaatcacgtcaatcagggttttcttgttcacggcgatttcctgcggtttgtatcctacgtaggaaatgacaagggtaggattggcagtagtcagcttcagggtgtactggccgttgatgtcggtaatggtaccgttgcccgtatctttttcctgtacgcttactccgatgaggagttctcctttttcatcggaaacgcgtcctgtcactgttccgctttgcgcgtgaacctccagacagaacgttgccaaaagcgcccatatccatagcgctttcaagtgatgttttttcatcccaaataagttcatgttactttggtttaaaagtgaatattaaggttacaaaaaatactcgcgtttttttgcttcggcggcaaaataaggagtttgccgataaggaacagtccgtgtgggtgacagatttttggcaaaagcgggtggtcgctgttgagtacaaggatgttctgtagagtacagtttaaagtaattgtaaataagagttttatatgtgtgtgtgtctatatagagcacaaggagagaacaaggttgtgcctctttttaaagtcgtgttaagcctgaatcggatgtgattttgcttataatggtatacttatgagtcaaattgattaagtggtactatcttcatttgattcatatctgatggaaaatgaacaaaagttttatattacgttattggagattccgggcggatggatggcaatacttgttttgacagagtccggtgcttgacgcgacagacactggtgtttgttataacagacactggtgttcaagacgacgggcacttatgtttgtcagcgtaaaggttggcggtcgtaaacctcaacttggcgtattcaggccttcacttcacgatgctcatcgtgaaaagaagtttcaccggaatccccgatggacagggtgatgcggaaaaaggtgaaagatgtgcaggcgtgaacagggaactaaagtgtcgcttcttcctttggcctgttcttctcccgatactctttcggtgtcatgccgaacatgcgtgtgaactctttgtagaaataagaacggctggagatgcctacttcggttatcacgtcctgaatggagagctcctcttcttgcagcaggcggctggccttctccatgcggtagttgcggatgaggtcgctgagcgacagcgtggagacatccttcagacggcgatagaagttgcgcgggctcatgttcatgcgttcggcaatgaaagccgagcccagttcttcctgcttcaggttgtgggcgatgacttgcagcagccggcgtatgaattccgtctgctcgtgggtagtgcagcagatgtggtgtgccagttcgcccagctcgtccatgtagatttgcttggcctcgtgcttgccatagatggccacgtacaccagctcgcgcaggaaaaggatgtcgtagggcagtgtcagataggaatcagcccacagcaccagttcgcgttgcaccgacgagctgacctgccacgtcagcagcgggatgaaggggatgtgcgacagcagcgtacggttgcgccgaatatgttccatgaagcgctcttcggctcctgcgtataccgaaaggtcggctatgaataccgaaggaagcgagcggcgcatctcttcgaaggcttcttcgatggtgcgcacgggcatgacgtgataatcgtcggccagcaggttgctgacaagccacgtcatttcggcacgttcttcgagcagaaggacacttttcttctctccttcggcagatgcttcgtgagtgacgggggcaaggctcagggtgaggctctgccacggctcttcgcagtgcagttcggtgtgggtcacttcgagggtagattgtacgaaatgtgccagtagctgtatgccgaaggtggagtcggcacttttctgcttgggtggttgggtttgattggtgagggcgtcatgcaaatatttcatgcttttgccctcgccggtgaaggtcaggtacagccgatctccgtggagcgaggcttccacttgggtaggttgggctccggtttctttggttatccgcaggaaacagtagtagaggatgctgtagagcgcattctcgtagaccggaaaggtgagactggaaggggtggagaggcggatgccggtggttgcgatcacttgcttgtctagggtgtgcagcacacgttccagagtttccttcacgttgacctcggccgtcacgatgaagcggttggggaagaagaggtggaattcttcaccccgcagcgtatcgggatgcaggagggcggtcatgagggtttcgcgcatggtttctacggtttcacgctgctcggcaggcgtgaggttgtcggcacggaggcggtcgcaagcctggtagagcagtgtaaggcggtccagcatgctgcggctgtagtccgccatgttggtggcatccggttcatcggggcgctggaagcgtgtggtaaggcggcggtacgaccgtttgcggtggaatgcgtagccggatatccctgccacgagcaggaacagcaatacatatactgcacaagctgtcttgctcaggtaccagggcggcaggatgcggatgggcagcgaatagtatttgaattcattgtcgaagacgtccttcttatattttatatggaggatatagttacctgtgggtatgtgtgtgtagaacgtttcgttggcattgctgaagggcgaccattcccggtcgtatccttccagccggtaggagtattcgatgtcgttggccgagaggaagtcgggtacggcaaaggtcagcgagaaggagttttcgccggccggcagttgcagggcctttccgttgtcggtataatagtcggacaacgccacttggcggcgtcccaggctgagcttgcgcagcagtaggtcggggtagcggtcgggcgtgcttttgtctttctccttcttcagatagagcagtccgtcgatgccaccgaagaagagccgtccggagtaggggcaacggtagtaggcatcgtcgctgaactcgcctacctgcatgcccgagttgtaatagtaggtgtgaaacgattggttttccggattgtacttcaccagtccccggttggtggagagccaaaggaagccgtggttgttctccagtatgccgtgaatcatgtcgttcagcatgccttggctgcggtctatgcagcgtggggtggcgtgcgtggtgggggcgggcaggatgatgaatcccgaggtgctgcccacgtagaggttgcccaggctgtcggcgtgtaggctcagtatatcgtctgtcggtttgtggagcagggacttcagggagatgacggtatactcgtccgttgtcttgttgaactttacgatgccctggccccggcttcctagccataggagcgagtcgcctccggctgtcatggggaagaacatggtaatttctttctgttcgtggaagaattcgtagggcacgacccgtttggtgcggaacagcttcccgtctccttcgaacgtgattttgcggaaaccgctgcccgaggtggatatgtagagcgtgctgtcgttctcctcgtgcaggtcgtgcacctcgacggtagtatcggagagatggccttccacttgctgcagggtgtggtcgtcgtaagagtagaagtagagccccggcgtgcccgtgcccagccagaaaccgttgtaatagcgactctgtttcagtatgtagacgtggaattcccgttcccacttccggtagtcggtggccttctgccggccttcgggggcaatcacttccgttttctcgggcttgatgccctcgtcgtagcgcgatatgtgcagtagtccgtcgcccttggtgccgaaccagaggtcgccctgcgtgtcggtcatgatggagcgcacctgtcggttgaggttgggtgaaaggctgccgagcagcaagttggtggcaatgtcctgcttgcgcgagtacatcagtgccccttgtccatcggtgcccacccagaggatgccttgctgcgggtcgtggaagatgtcgtagatgcgcacgttgcgctctatcatctctatctcaaacttgtgggaggtgcagaggcgtatcagcccatgtgtgcggaaggcgatgatgatgtcctcgtggaagggtacgatgccctctatgtcgtctccatacgccagcagtgaggcgaggttgcggatgtagattttcgtcttgcgcgagaggtcatagaggtagaggtcatggtccgagtcgataaagcagaaacagttgttctggtagaagatgtgtcggatggctttgggatggaaggcgctcgtcatagcggttggtttcacggagagcgagtccttctcgaagttgtcgatggacacttgtatcagcgtgcccgtatcttgtgggaagagccagaagataccgttgggggtgacgaacgagcggcggtccatgtcctcggtcgatacggtaggtgcttgcagtttgacgaaccgttcaaggcgcgggttgtagaagtagagtgtatcttgtgcaatgatccatgtgtctccgtgctggttggagtgcaaatagtagtccttgaactcgtagctgcccactaccttgcgggctgtcggcgacagacggttcacgcccaggtgtgtgctgatccagaggcatccgttgtctgcctggttgatggcgtggatgatgttgttgttcagtgtcttttcgggcgagaactcagagcggaagatttccatgtttcgtccgtcatagcagttcaccccatcgtaggtacccagccacatcagtcctgctgagtcttggtagaaacagaatacggcgctgtgtgacaatccttgctgatggtctatcctgctgaggaaataagtattgtccggaacagtgttgccggctggagacggcactgcctgaaggagcaggacaattattagtaggaagtattttttcatatatattagtagtattcttttggcgtttaaaatacaaatgtagaaaattcttcttttggagtcaaataatcttcctgtttgtttgctttttgttcatgaggcggtttctgcgggcgtggctgtttcggtgggggagggagggcaacccgaaagaggttaattcacgttaaagtgaaaacttcaatcctttggctttcaataacggttacatggaggtaacagactgagttctaagtgccttattgtgtgacatgtggcagtcgcctaactttgcggctgtaaatcaaaacatataggagaaatcattatgaagaactatcagaaggtaaatgtgcccgcaggcgaggcacgtgtcgagctgcacgattcattgaatctgaccggtgcggaagtatccatcagtaatctgccggcaggcggaggagtgccctttgtgcattcgcacaagcagaatgaagaaatttatgccgtcctttccggacgtggcaccatggtgattgacggagaaaccgtagagttgcaggctggtgactggcttcgtgtggctccggcaggagaacgtcagttgtctgccgctgcggacagtgccatcagtgtgatttgtattcaggtgaaagccggttcgctagagggatttacgatggcggacggtgtggtgaagtaagggaggctctctctgtctttgcataggatatttacagtgttatacaggcaatgcgggtttcttgtttcttcggcaccggggaaggtagagcttcccggtgtcggagaaattgccttgagtacattgcttaagatttcgtaagatggtatgaagaaagaaccgcttccgtgcaaacagcgatatccgtatcattgcatccggtgccacgcgttcggatggtcttgtgctgaaggatgtagaccgtattaacgggagtgatggcagtgacggttccgatggtggcggcgaccagggtgagaaccctttgggatagtagtctgtagggctgaaaaagttccgatgatatagagactgtaggtctcctttccgtactatgtgcgggggggagaccacggctctttcatttaagggagttagaggagttaaagccaatacttctgtgactacatagacaagagtatcggctttaactcctttacttctaacggagcggagcgaagtgataacccctataactcccttaaatgagaaagccgtggagggaggccttgtctttaggtaatgttctctccaaaaataaccggattgcctttcttgaacaaacaattataaatatctttggagcattattcactcattaaactaacagaaaacaccatgaaagtcacaaacaaatcaacagtgagagtaggcgcggcaggagtcgcagtcattggaattatagtattgttcttggtcatgtttgccgtggagcgtattgattcgggacagacgggcatcatcgtcaatctggccggtagtgagcgtggagtagatgatgccaaggtggaaaccggatgggtggtttacaaccgttttgccaagcagctattcgaatatcctgcatttgcgcagattgtagactacgaacctttcgacattcaggacaagaagggaaccatcttcaagacagaccctactatagaatacttcattgagcgggaggatgccaaagtagtttttctacgctatcgcaagactaccgaagaattggaacagagtgttatcctgacggaagtgaagaacgcttataaggacgtggcaggactctatgagacggattcgctcatcaacaaccgtccggctttcgagaaggaggtggaggcattactgaaggagcgtctcagtacccgtggctttacgtttaccaacatacagtcgtccgtgaaacccaacgatgtgctgcaagctgccattgacgaaaagaatactgctgtgcagaatgccttgaaggtggagaatgaaaagaaagccgctatagccgaggcggaaaaggtagtagctgccgccaagggtaaggcagatgccaaccgtatccttcaacaaagcatcacgccggaattgattcaactaaaggctgtggagaaatgggacgggaaattgccgttgtctaccggtggaaatacgttgccattcctgaagttgcaatgacaatctctatgagaccccattggcaacttgattcttttggggaggtactgattgtgtgcgcggataatcacaaataaatcaagcggtaagccatctatctctctatttgctaagatttattcgtccgatacttgttgaattatcgtccgacagccgttgaattatcgtccgacaattgtcggacgataattcaacggctgtcggacgaataagttttagtaagcaagaatttaaaatgcagtattgcaggaattgttgcttaaatagggaatgtagtaaatgggagacaactgttgctcatccttgttgggatcgcatgaacaaggttttcaagaagataaagggcgtttcgccgagtgaatatgtacttttgtaagggaaaaggggaaagatacgaaaggtatgggcataaaaaaaggagtaccgctgtactccaacctttgttaaccttaaatctaatactatgaaaaacacattgcaaaggtacgaactttttgcttatctccaaataaagcaaataaaaaagactgttttataacatgttttaggaaaatgcgtctctttgttaaggcttgctaaggttttgaagcctctccgtggctgttttctaaaaaagaattatctttgtcacattaagttttgggtcttacttgacgatttcctgctctcttggctcaaagctttggaaattaaaaattaaagacttgtatgcacgaagatattgtccttaccccgatgatgaagcagttcctcgacttgaaggcaaagcatcccgatgctgtcatgctgtttcgttgtggtgacttctatgaaacctattccaccgatgccgtcgttgcgtccgaaatcctcggtattaccttgaccaaacgtgccaatggcaaggggaaaaccatcgaaatggcgggtttcccgcatcatgcgctcgacacctatctgcccaagctgatacgtgccggcaagcgtgtggccatctgcgaccagttggaggacccgaagctgacgaagaaactggtgaagcgcggcatcacggagctggtgacgccgggagtttccatcaacgacaatgtgctgaactaccgggagaacaacttcctggctgccgtgcatttcggtaagggtgcctgcggtgtggctttcctggacatatctacgggcgaatttctgacggcggaaggacctttcgactatgtggacaagctgctgaacaactttgcccccaaagaggtgcttttcgagcgtggcaagcggctgatgttcgaaggaaacttcggcagcaagttcttcaccttcgagttggacgactgggtgtttaccgagacatctgcccgcgaaaagctgctgaagcatttcgaggtgaagaacttgaaaggcttcggtgtggagcatctcaagaacggtatcatcgcttcgggagccatcctgcaatacctcatcatgacgcagcatacgcagatagggcatgtcacttcgctggcacgcatcgaggaggataagtatgtccgcctggataagttcacggtgcgcagcctggagttgatggggtcgatgaacgacggtggcagtagtctgctgaatgtgatagacaagaccatcagcccgatgggtgcccgcctgctgaaacgctggctggtattcccgttgaaggacgtgcagccgattaacgagcggctgaatgtggtggaatactttttccgccagcctgatttcaaagagttgatagaagagcagttgcatttgattggcgacttggaacgcatcatctccaaagtggcggtagggcgtgtctctccgcgtgaggtggtggcgctgaaggtggctttgcaggcgatagaacccatcaaggcggcttgcatggatgccgataatgccagcttgaaccatataggcgagcagttgaatatctgccagtttatccgcgaccgcattgaccgggagatagacaatgacccgccgttattgattaataagggaggtgtcatcaaatccggtgtcagtgccgagctggacgagttgcgccggattgcctactccggcaaggattatctgttgcagatacagcagcgcgagagcgaactgacagagattcccagcttgaagataggctacaacaatgtcttcggctactacattgaggtgcgcaacacgcataaggacaaggtgccggcagagtggatacgcaaacagacccttgccaatgccgagcgctatattacccaggaattgaaggagtacgaggagaagattctcggcgcggaggacaagatactggtactggaaacacaactctatgcagagctggtacaatctttgagcgagttcattcctgccattcaaatcaatgcgaaccagatagcacggttggactgcctgctctcctttgccacagcggcgcgcgagaacaactatatacgccccgtcattgccgacgacgacgtgctggaaatccatcagggacggcatccggtcattgagaagcagctccccatcggcgagaagtatattgccaacgatgtgatgctggacagccagacgcagcagattatcatcattacgggtcccaacatggcgggtaagtccgctttgctgaggcagacggcgctgattacgctgctggctcaaatcggcagtttcgtgcctgcggagagtgcccatatcggtttggtggataagatattcacccgtgtgggtgccagcgataatatttccgtgggcgagtctacctttatggtggagatgaacgaggcggcggatatcttgaacaacctttctccccgcagcctggtgctgttcgacgagctgggacgcggtacttctacgtacgacggtatttccatcgcctgggcgattgtggagcatatccatgagcatccaaaggcgaaggcacgcaccttgtttgccacgcactaccatgagttgaacgagatggagaaaagcttcaagcgtattaagaactacaacgtttcggtgaaggagatagataacaaagtcatcttcctgcgcaaattggagcgcggtggcagcgaacactccttcggtattcatgtagccaaaatggcgggtatgcccaaaagcatcgtgaagcgtgccaatgacattctgaaacaactggaaacagacaaccgccagcaggggatttccagcaaaccgatggtggaagtgggagagacacgcggtggtatgcagctcagcttctttcagctcgacgacccggtgctgtgccagatacgcgatgagatactgaatctggatgtgaataacttgacgccgctggaggcgctgaacaagctgaatgatattaagcggatagtgaagggaaagtgatttttacttataggagaaaacgtggaatttcaggacttgtacaagtttttgcacaagccctgaaactccatggttaatagtttttcctctaaaattattcttccaagattatctctaattctgctatggcagctttctttcctttgtcatgggccgataatcccaatagtttcacataacgtgcccggcaaggagtaaattctatagtttgcgttgctgtacctatatggaaggtgccatagataatgggctgcccccaattttttccatctttgcttgcatatacttcataggaagctatccgtccttcttcgctatcttgtcgcggagtgtagcggataccctttatagtggcctctttggatagggaaagatgtatctcatgagggtagggagctatgtagaattggttgtgtaccgtgtgccaataggtgtttatgttaccgtctgccgccagcttcatgctgttgtctgcatcgctgtctacggagaccactatttgtctctgggatgctccgctgatgtttttcaggatgctcacattcagttcggctgccgaagcccatttcctgccgtgcatttcggacaagggaacgaatttgaagtaacgggcagtgacgggtgtttccaatgttatggtttgggcagacgtcagattggagaatgtacctttgacggtgctttcccaattttttccgtctttgctgaagcttagctcgtagtctttgacgtgtccgttatcattggaatgtcgtgctgtgtagatgaatttgtccactaccagtagggaagccatgtctaccacaatgctgtgtggaaactctggaatgggttcgtgccaacgggtgtgccaatacgtggaagggtctccatcgatggcgttttgcgcctcttctccttggctgtcgctgctggaggagaccaccttccatgccgagtggtctacgaatatgggtagttccatagtagtgaccaggctcttgcctaattttccagaaacagcgtatgtttgtatctttccaccgtcaatgaactcgaatggagctgtgtattcccggtattcgttaccgttaaggctgtagaagatggtcgcgtccggagttccggtactcatttgcaggtaaccgttgttatcgcgttctaccattacgggcatgcatgcaggcatctgtacgcgtgctttcttggtaagctcactttgcgtgtagcttctttccaaaggcatcatgatgaagctgaatgctacgggagttgcttgcagttcgtattttttcatcgggcctggaccgcagcttgcgttgcccagaggacgattgtgggcatcaagacaaagaactgtctccttgcgcatcgggatgtcgtatttgtgaatcagtttttgcagatggtcggggtctgccatgtcttgtgctctgacatgcagggcagaagccgccatttggtcgcctgccacgaaaacgaagcccataccgtcggcgttggtgatggaaatccagcgtacctcttcatggttacccatctcctgaggctttacatagttcacccattggtcggatactgtactttcgtatacgcctattggggtggcatccttgcggtctacgtagttttcccatgggccacgtccataccaacgcatacgctcgaagccttcgggcagttccattcgatagcccacacgcggaatgatttcgctgtcggataccgggatgatgacactgttcaccatgatggaaccatcggcatttacggtgtattctatttctgtgcgatactcaaaaccgagtttacctttgtggcagttccggatgtgcagggttattctgtcctcttcttggtgggtttcccatttgccggtttccgcttgcagctggtaaaggcctttgcgttgccaatcgccacttacctgtttatcgttgtcggtgggagcacggaagaggttcagttcgagtcctttacttatcagggggatattattcaatgtatatgccgataaagttccttcttccttggagaagacagcttcaaaacgttcacctttcaccaccaatgcgtcggcagtttcgtttagattgatgtttcctttttcgggtacgaatataggtttctcgctgcttgatagcttgaattgttcggtggctacctcgtagtcggcttttgcccattcggtatctcttttttggcagaaactgaaattgataaagtattctgctccgggtaccttcgttgcgggtatgtctggcagggtgatgactttgcttgcctgtgcttccagcttcaaatcttccagattgcctgagcagacggtccttccatcttccgttatttcgtatctcccgtagaggtcttccatattggcatggaatcgcttgttgctgattctatatttgccattccctaatgcttctatgcggatgggttgatgtatcttcttcatttcataggatttggcagataatgtacggtcggagaagatgacgccgttggtacagaagttaccgtcgttgggcttgtcaccaaagtcaccgcctacggccatgtagaagcctttgccgtcgggagtgggcatacgcaggctttggtccacccaatcccaaatgaaacctccgatgagtgccggatagcgttcgtaggtttcccagtattccttgaagtttcctatggaatttcccatggcatgggcatactcgcatactacgtgaggtttcacgatctcgcccttttgtattttctccaatcgttcacggcctacgttttccagccagtccacacttgggtacatgcaactggtcacgtcgcagaaggaactgtttccctcgtagtgggtggggcgggtagtatccaaacgtttgatggccttttcagcagtggagaagttgtttccgtttcccgattcgttgcccatggaccacattacgatggaagcgtggttacggaaacgtttcacttggttctcgttgcgctcggtgaatgatttttcccactgtggctcgtgtgagagacgcatttcgccgtggcactctacattggcttctgccaatacatagatgccatagcggtcgcataggtcgtaaaagtaagggttgttggggtaatgggaggtacggacagcatttacgttcagcgctttcattagttgtacgtccttttccatctcttctttggagacggtacggccattcaatgggctgtgatcgtggcggttgacacctttgaaaagagtgggtttgccgttaatcagcagttgtccgtttttggcaaactctatttcgcggaagcctacctttacactacgtaggtctgtcacttttcctttctgttttagggtcagggtcaggttgtagaggctgggtgtttcggctgtccatttcagtgggttcttcacatcgaattccagatgggtactacctatttttgtggcgtggatagtgcgtgatagcacttcctttccttctgtgtcggagagcttcactatgagttcggcagaacttttcttaccggtgatttccacgtccaaaaaaactgtagcattacgataatctccgtccaagtcggttcggaagaagaagtccctaatttgcgtgcgtggtgctgaccataggaatacatcgcggaagataccgctgaaccgccagaaatcttgacattcaagaaaacttccatcggtgaaacggtacacttcaactgccaatgtgttttttccttcttgtaaatagggagtcagattgaactcggcaggtaagtagctgtcttctgaatagcccacttttttaccgttcaaccaaagatagaaacctgcttccactccattgaagcgaataaatacatctctgcccttccaagatgtgggcaaagtgaattcacgtcggtaactgcctacgggattgggcatgttggcaaaagtatagtctgccgggcgaggttggatgacgttgggccattgtactcctttactgtaatcacagaaagggtaaatggtattacaatacaaaggcttgtcccagggcttattatggcgtacagcctctatctgccatgtggcgggcactttgatgttatcccagccacttacgtcgtagtcgggcttgaagaaatccttcggccgtttttcgggatcggccacccaatggaatttccatgtaccgttcagagtttgataatagggggattcctcgatgctcaggcgtagggcttgtccttcgtcggcaaagggaatagcggtttggcatgccgtttctttgttcactcccgaaatgttcaggtcattccattcgggttgttcgtgagtttgtgctgttgcggtagcaagcagcccggtgaatgcgatactcaaaaaagagcttcttttcataaatacagatggtataagatgattaagtattagtgatttcctgtccttccttcacgttcttcttttgctgttcgcagtattgacggggtggcattccgtaacgttgtgaaaaagctttatagaaagtgcttcggttggtgaatcccgtgcggtccatcagctcttcgatggtgaagttgctggagactaacaagcgttccgccgtggagaggcggtattctttgatgatgtcggcaggcgatttgtcagtaagtggtttcagtttgcggtagaactgccggctgctgtagcccatttccttactcaaaagttctacttgcaggtctggattggctaagttcttttcaatgacttctgtcattttctctaagaattcttgttcttctttgtgcaagcagcttccttctttccaggtaaaggtgctgagtgccgaactataatattccttcaggttttcttcgcggcggatgagatgatagaccatcttttccaaatatttcacattgaaaggcttggtgacataggcatccgcccccgattccagtccttttacttggtcgtcttcgtgatgcagtgctgagagcaggattaggggaatatggctccacagcttgtgttgcttgatggtgaaggtgaaggataacccatctatatcgggcatcatcacgtctgagatgatgagatctggctgtcgttgctccaggctgtctaatgccttttgggcattattgaaagagagtacgttgtatttctctgtgaatatttcggatacgaaccacagcatggaagggtcatcatctatcaccatgaccgtctgcttgtttgcgtcgaattcttgggtgtatttttcgggcaattcttgcacttcttcggtgggaatgcttggagaagccgcttcgtatgcagtttgcggtacttcttgtccgtttggggggagcgagggaaggcttacagtgaaggtggtcagttcgcccggtgtgctttcgatgtttatgtctccttccaacagggtcaccatgtttttgcagatggccaaccccagtccgtttcttgagtttttgccgttcatctccacggagtcgagaatcttatagcggtcgaatatctttccgagattttccggtgtgatgcctttgccggtattggctatcttcaaaataagacgttcgtttttcgtgtacaatgttacgctgatgttccccttgtcgggtgtgtacttgaaagcgttggatatgaggtttccggctattttgttgaagcagctcaggtcggtgttccatgtcagttcgggggctatgtcaaggcagtagttcatttctctgttttccgccatgtcaccgaaggattcggcgatgtcccttaacttttcggaaacaggttgcggctgtatggagagcattttgttttccgtttccagtcttctgaactccagcaattccacaatgagaccattcagcttttccacattttgctgaatcatcttggcgtagcggtgcgtgtagatatctgtctccttgtgggtgagtatcttctcgcacggtccctgaatcagggtgaggggggtgcaaaactcgtgggtgatgttggtgaagaagcgtagttttgattcatagacttcctcttttttctgtcgttccattttcttcatcatgtgctgccgcttcaggcggtaggtatagaatgcataggcgactatgcctgtacataatagtaaccctaacaaaaagtagcccacataggcccaggtactgagataccagggaggagcgatgtaaatggtgaaggcttgcggatggctttctttaccgttgatgttgttgcggtatttcacaaacagagtatattctccgggggaaaggttggagaagatggcattgggtgaaactccgttttctatccattggtcgcttgcttcctttagtttataggagtagaaatagtcgtttccgttaatgtagtctgttatccggaagttgagctggaagaagttgtgtttgtagtccagttgtagcacgggcttcccgtctttgtaatgtaaaaagtcatgcaggttgtattccttaccgaagatggaaagtcctttcaggctgatttcgggcatatagtccgtggtgatgtaagaatcgggcttcacggtgacgaagccgtttacacctccaaagaaaaggattcccgtagcattgtctttgtagaaggctccatcactaaattcggtcacggccagtccgtttccgttgttgtaggtctgcttggtctgttcttggggattgagtctcattaatccttgattggtactcacccagagattgcctcggttgtcctccaagataccatgtacggtgctgttggtgtagagctttgcactgatgctgtctgggtttccgtcttcgtttgagtagaagcggagaagccctgatccagtgcccagccagtagccttgctcgtttttgtgtatggcgaacacatcgttggcggtttggctgtttaccaagttgttgaagcggaactgtgccatttctccagtacgtacatcaatgcggtaggctccgagccctctgttcccgaaccacagcgtagagctgctttcacggtaggaggtgaaaaaatagtttgatgccatatgtccgttactcaccaaagtccgtgtagcatgcttcacaataggatcttttctctgattttctagtgtcacctttacgattccttcgcccacggtggaaatccaaagtgtactgtcattggtttgatcaatggagtgcacatatttcactttggttccattggcttgtaccgccagttctttcaattggtgggtagagtaggaataataattgattccgttttccgtacctatccaaagtcggtcttttccaccgggtgcaaaacagtagacggagttgtcggtcaatgtgctgttaccggtgatgagacgatcatgtttttcgggtgtattgttgacaagataattcggtatacgcaatatgccactgcctttggttcctatccataaggtttgctgtgggtcgaggtaaaggctgcgtaccgggttgttcacctgatatgcgggagtgttgagcagggtgttggtcatggtgaatgtgtcattgtaaagcatgtataacccttctccgtcggtagctacccatacgatatcttgaaatttgtctttcatcagacagaagatgcccgactgtatttcagtgtattctatacggtatttaatcttttggtttgcttcatatttcagtactatcaagccgctgcttttgaaaccgatacagaagtcattttctcgtttgatgatggaagatacttcacctcgtttttctatttcgtctttcaggtcggcaatgtagtaacactgtcggttgctgaaactatattcgtagagggcataggtttcatcaatgaagtaggctgaatcttctccgatgaaggcatgcttcaagccgtgatgtccaaatggcttttccggaatcagtgtcacgctttttcccgtgtggttcagacgatagcaacgagtgttgtttccagttgcgaatatccaaagcaggttgttggaatcaatggtcatggacagtactttattaaaatccatggaagagatgtttaactggagaaatttctggttctcttgttggtagtgatacagatttccgtcatctttcagcactaacatgcacttgttgttgcttcgtgccaagaagatgttgtccttgaattcggtaaaggtccggcaggtctgtcggtatgtatccaatctgtctaacccgtagttggtttgtaaccacagtatgcctggctctgattctacgatctggctgataatgttgcctgacaataggttgcgtgacacatcaacgggcgtatataggtggatattgttgccgtcaaacacgttcagtccgtcgcatgttcctatccatagtacaccttggctatcttggtaaagggattggatggcactattggaaagaccgtttttattggagaattgccgtaggctgtaagcgtacacaaaatccggaaaacagcataagaggctgataagcaataaaatcgtatggcctttccagtatatgtctttcatgtggcttgttgtattgattttgagttgcaaagatatattttaaggtggaaacagtcaatatttgcaatatatttctttagttgtaggcttacagtttgctttgtatctgctccgtatccttagaaatgtatttgtacggagcagataggtatggatatgattagcgaatgaccgcagcgaatccaccgttgcgtgccaaacggactgtgatatggtcgcctttcttcaaggattgttcttgcttgcggtagtccatggcttggtggtcagcgttgatgccgtcttcaaaagaggtcatgagataattttttccttcttgcaggaaatcaagggagatgttaaagacccgttcacgttcgcggttgttggtcatgcctcctatataccattgttctcctttgcgtttggccacgatggcatattctcctgctttggcttcgagagcgatggtttcgtcccatgtttggggtacttgggtgatgaaacgtgtacactcgtcgttgcgataatagagggtaggattgtctgccatcatctgcaggccggtttcaaaaagaacaaagagtgccatctgataggcacgtgtgccgatgctggcagaattgggacgttcggaatggtagacttcaggctgcatgctaagcatggcgccgggagtatagtccatggctcctactgcgttgcgtatgaaggggaaatagacactgttgtcgggacggcatccgcccatttgctccatacctcttacgccttcgtaggagagtacgtttgggtatttgtattctaatccggcaggtttgaaagcaccgtgaaagtcaacgaagagatggtgtttggcggcttcatgtgctacgcgttcatagaagtttaccatccattggtcgctacgatccatgaaatctatctttacgcctttcacaccccacttttcgaaagtttcgaataggtcaaagtggttttctaccgtaagccaagtgagccataacacaatgcctacgtttttttctttgccgtagcggatgagttcgtgtatgtctaccgagggattgggtttataggggttgcgggtgttcatggcccagccttcgtccattactatatattctacgccgtagtgggatgcgaagtcgatgaagtatttgtaggtgtcaaggttgcaacctgctttgaagtccacgtcggggccgtagggtgtggctccgttccaccattcccagctggctagtcctggtttaatccaagaggtgttttctatgacattcttttcagcgaggcgataggatagagtgttttctataagtttgcggtcatcgtcggtaatgacgaagtaacgccatggataactgcgcttgcctgcggtacgggctatgcagttggcttctttcagaatcttgagactgcggtcaccgtcttctccgaattcaagaggcagacgggggaagacggcggtaatgccgccttgtccatcgtttttcagaaacatggcgggatagtctgtcagattggtttcactcatgaggattttgtcacctttgggtgtgctggctaaaaggggaagcagagccatgcgattggagtttttccactcgctgcttgtttggtggcgatattcttcttcataggaagtcttaaagccgtcaggttgctgaagatgtagcaggcaatcatccacaaagttcaggcggaggatttcattcattatttcttgctcgcctttcaggtcagtaaggaagcggtaggcgaatccgtcatcaaaggcacggaactctactgaatagcctcctttaaacttcagtagcaattggttgtagcggttggttatagtagagaatttcaggggtacgatgggagtcagttcctcgtttacattttggcgtactactttgtttagtttaggatggatgcccagctggtggttggcagtttccagaccaatgacacagttgtccatcagtgtttgatttccttgggttacatcatattggatttgatcggtcagctccactgagatgcggatgtttccgctgggtgaggccagttgatgtactttctgtccgaaagcggtcagtgagaggcagagaactgccgagagtaggaattgttttttcatgttcttagcttttggatttttacaatatacaaaagtagtttgtattctgtaggaaatgtatgctatttatgacataaatatataaaatcatgccacagacgactttttacatatctatgtcgcgaatctgtacagtatgagagtgaaggatgggctatttttgttaccaacattccacatgtcagaaaactattgttgccggatggaggctaaagagagaaggtgaaagagcggtttgcggctagaggaggcagcacatttataacaaagaatgcggtggtttatatcgaattgacattatcttttacgaaaaaacaataataacaaaaccatgaaaaagagacgaatactgatggggaagacccatctgatagcgggagccgtgatgttggccgttgcaggaggacaattatcggctcagaccgttgcaccgaagaaagcaaaagcgtacatggtggcagatgcccacttggacacgcagtggaactgggacattcagactactattaaggattatgtttggaataccttgaatcagaaccttttccttttgaaccagtaccccgactatatctttaattttgaaggtggagtgaaatatgcttggatgaaggaatattatcctcgtgaatacgaactgatgaaggcttttgtaaaggcaggtcgatggcatgtgagtggggccagttgggatgctaccgacactttggtgccgtctgttgaatcgtttattcgcaacattatgctggggcaggagttctatcgtaaggagctgggggtagaaagtaccgacatcttccttcccgattgcttcggattcggttggacattgcctactgttgctgcccattgtggactgataggtttctcttcacagaagctggattggcgtaacaatcctttctacggtaagagcaagcatccctttaccatcggactgtggaaaggagtggatggagcgtccgtcatgctggctcacggatatgattacggtcgtcgttgggataatgaagacctttcagaaaatgaatatttgatggaactctccaaatgcactcccctgaataccgtttaccgctactatggaacaggtgatgtgggcggttcacctaccatcgcttctgtggcttccgtggagaaaggtatcaagggagacggtccgttgaagattatcagtgcagccagtgaccagttgttcaaggattaccagccttatggcagccatcccgagctccccgtatttgacggtgaattgctgatggacgttcatggaaccggctgctacacttcacaggctgctatgaaactctataatcgtcaaaatgaacttttgggtgatgccgctgaacgtgcttctgtggctgctgcccttttgggggttgccgaatatcctggtaagagcctgacggagtcttggcagcgcttcatattccaccaattccacgatgatttgactggtaccagcattccccgtgcctatgaattttcttggaacgatgaacttctctctctgaaacagttctccggtatcctgactcattctgtgggaagtgtggcaggcaagcttgatactcgtgtcaaggggattcccgtagtgctctataacgcttcgggcttcaaggctgcagatgtggtgaccatcgaagtggaggcttcccgttttcccaaaagtgtggctgtatataacgaacaaggcaagttggtggtttctcagttggtttcatatactgatggaaaggtccgcttgttagtagaagccactatacccgccaatggatacgcagtttacgatgtccgcctctccggcgaaggaaaagagatgtctgctgttgaagctgcaagtgttgaaaattcgttctacaaactgacattgaatgagaacggtgacattacttcactgttcgacaagagaaacaacaaggaattggtaaaggctggtaaggctattcgtttagccctcttcactgaaaacaagtcattcgaatggccggcatgggagatattgaaagagactgtggacgctactcctatttccatcaccgaggatgtgaaagtgactctttgcgaaaacggtgcattacgtaagactctctgcgtggagaaacgtcacgatgattcttttttccgccagtacatccatttgtatgaaggtgtattggcccaccgcattgactttactaacgaagtggactggcagtctaccaacgctctgttgaaggctgagtttcccctcaatttgaataatgaggtggccacttacgacttgggcgtaggcagcgtgcagagaggaaacaacatcttgaccgcttacgaagtatacgctcaatattgggcagatttgacggacgctaacggctcttatggcgtttccatcatgaacgacagcaaatatggctgggacaagcctgataacaataccttgcgtctcactttgctgcacactccgaagacaaaaaagaactatgcttatcaagatcgtcaggacttcggtcaccatacctttacttacagcttggtaggtcatgtgggcgctttggacgtagttcaaacccgcgagaatgctgagttgctgaaccagcgcatcaaggcgttcgttgttggaaagcatcgcggcgaattaggtaagagctattcattggctttttccgataaccggaatgtacttattaaagccttaaagaaagccgaaagttcagatgaatatgtggtacgcgtgtatgaagccgcaggcaagcaggcgcagaaagcctcgattgtctttgccgacaaccttgtggctgctgtagaagcagatggtacggaaaagaccatcggtaaggctacattcagtggaaatcgcttggaagtgtcagtcaatccaaacagcattaagacctacaaggtacgttttgcttccaataaaaaggtgcagacggtggccgaaccattgccccttgtttatgataagaagtgcttcagttggaacgagttcaaggctgctgccaactttgagtctggttattcttatgctgctgaattgatacctgccgagatgaatgtgcatggagtgcctttcaaattggagacacgtgaagagctgaatggtatggcttgcaagggcaatgtactgaaactgcccgccgactgtacttataacagactctatatccttgctgctgccgcttctgataaagatgtgaaggggatattccgcgtaggcaagtatgtgcaggaagtcattgttccttcttatactggcttcatcggtcagtgggggcacaccggacatacggaaggttatctgaaagatgctgaagttgcctatgtgggtacgcaccgccattccggtgaaggcgatcagccgtatgagttcacttacatgtttaagttcgcaatagacctgccagaaaaggctactgaggtggtattgcccgataataaggatattgttatttttgccgccactttgactgatgttgctgctacttctgtttgtcccgcttccgaactgttccgtacggcaaacaagtgcaatcgctatcagacggaaagctccacagagagagtgaacattctgaagcaggacatggtaatgggctattcaagctatgtgaacgagaaagagaagccggctttcatggtagatggcgacgaaaacacaaagtggtgtgctattgctgaaatgccccactacgtagactttgatttgggcggtgaaagaagcattaatggctggaagttactgaacgctgccggcgaaaaccattcctacgtcacttcctcctgctttctgcaaggtaagagcgacaagaatggtgaatggcgcacactggactatgtttctggtaatggtaagaatgtactgaatcgcacgctaaataagtctgaaagtgttcgctacctgcgtcttttagtgacacagcccatgcaatcggcttctggtaaagatgtgcgcatttatgaaatggaagtatacgaataaacagttattatattcccatttttcagatccttgtgtctgtcaccacagacacaaggatctgatgattctcaggtgtaagtgcttaatgtgagtaagttaacaactctattgaagtaaatttattggaaataacaaataccttgaaaaatgaaaattaaaatatttgctgttgtatgtttattagctgctaatctctttacaatatctgctcaaaagtggtttacgcctgaggcggagaaacaagtggatgctcttttgagccaggtagtagaaggaaactacaagaataatcgctatcctctactccgtaagcccttaatggaacttcctttaggcaatatcaaacctaaaggctggttgcacgaaatgctggttcgtcagaaaaatggcgccagtggtcagatggatgttctttacccttcggttatgggcaaacgcaatggttggttaggtggtgatggagaccagtgggaacgcggtccatactggatagacggtctacttcctttggcgtatatactggatgatgatgtcttgaaagccaaagtgcaaccttggatagaatgggctttgcagagccagcgtgaggacggattcttcggtcctgaaaaagattatccgggagagcctggactgcaacgtgataactcgcaagactggtggccgcgtatggtcgtgctgaaaatcctacagcagtattattcggcaacgaacgataagagagtcgtcgcttttatgacaaaatatttccgttatcaactgaataccttgccgcaaaaacctttaggacactggagcagttgggcagaattccgtgcttgtgacaatttgcaagctgtatattggctttataatcttacgggggaggattttttgcttgaattggggcatttgctgcaccggcagagtttcagtttcatagatatggtagataggggagacttgcgcagaccctgcactatacactgtgttaatttggcacaaggcatcaaagaaccgattatttattatcagcaagataccgaccggaaatatattgatgctgtcaaggaaggctttcgagatattcgccggttccacggacagccgcaaggcatgtatggaggcgatgaggctttgcatggaaacaatcctacacaaggctcggagttgtgttcggccgtagagttgatgtactcgctggaaaaaatggtggagattacaggagacatagactttgccgaccatttggaacgcattgcttttaatgctttaccagcccaaatatccgatgactttatgactaagcaatatttccagcaaccgaatcaggtgatggtaacacgccatcgtcgcaacttcgaccaggatcatgaaggaacagaccttgcttttggcactctgactggatacccatgttgtttttcgaatatgcaccaaggttggccaaaatttacacagcacctatggtatgccacacctgataacggcattgcagccattgtctattctccgtcggaagtaacagccaatgtgggtgataatgtaccggtggttatcagtgaagatacttactatccgatggatcatcagataacttttaccattaaagaggtgagaaataaggtgaaacaagtgaaatttccatttcacctgcgtgttccgaagtggtgcaagcaagctgaaatacgggtaaatggaaagatggagcaaactgtcaaaggtgggaaaatagctatcgtagaccgtatatggaagcggaatgataagattgaactgtatctgcccatggaggtctttactagcacttggtatgaaaacgcagtatctattgaaagaggtccgttggtatatgccctgaaaatggaagaaaattgggaaaagaaagagtttaaggatagttggtatggttcttattattatcaggtgacttcttcggatccatggaactacggattggtggattttgaccgtaacagaatgaacgaggtggcccaagtaagtatcaatagccaaaaacagcaattggactttccttggaatcaggaaaatgcaccggttgaaataaagatgaaggctcgtcttatccctacttggacagtatataatgaaatggcagggccccagcctttctctttctgtggcagtgccgaaggaggagagcaagaaatcacgctgataccctacggttgtacaaccctgcgtatttcagaatttccagttgttgggaaatgatgtttccgaagtatgggggaaacggtgtgtctgttttgtgacaaacttgttttagaattctgccatgtccggaatgtggacggttatgtcacggatttatagttggcttttaaccttactgtctatttttgcaatcgtttttaatagggtttatatattatataaaagaagactcctgcaacggagtgaaaaacaagtcgaacaatttaatgccgtagaaaaaagatgaaaaattccaagaaagcactcctctgcctattggcatgcgccttggcagtaaccggatgcaagacacagaaagaaccggctgtggcagataacgcaatgctggtcagatctacacaaacacttgattccttatatgctcactattccgcaccgggcacttgtctgttgcgtgagaattatccttcggacgtggaaggctataccgctacttatctggcttccgaggaacaaaagaaccgtcccaatctctactcttatttgtggccttattccggtaccttctccgcagtgaatgcgttgatggaggccactaaagataacaagaaagatttcgggaactatcagaagttgcttgatgagaaagtgcttccgggacttgctgaatatttcgatactcgtcgtatgcccgaagcgtatgcttcttacatcaaggacgctccgttgtccgaccgcttttacgatgacaacgtgtggctcggcattgacttcacagacgtctatctgatgactagccaagagaactatctgcagagcgccaagcttatctggaagtttatagaaagcggtatggacgattgtttgggaggaggtatctattggtgcgaacagaagaaggaatcaaagaacacttgttccaacgcccctggttccgtctttgccctgaaacttttcaaggctacgcaagacagctcctattttgagaaagggaagagtttgtacgagtggactaaagcaacattgcaggacacaacagactgcctttacttcgacaacatgcgtttggacggtgagataggacgtgccaaatttgcctataacagcggtcagatgatgcagtcggctgctttgctctatcagcttaccggtaatgggcagtatctgaaggatgcgcaagcgattgctgctgcttgtcataattatttcttcatggaattcacccccggacagggagaaccgttccatatgctgaagaagggtgatgtgtggttcaccgccgttatgttgcgtggttttatggaactctatcaggtggacggtaacaaggtttatcttgattcctttgcccgcagtctggactatgcttggacgcatgcccgtgaagataacggccttttcaatactgatttcaccggcaagagccgcgacaatcgtaaatggctgctgacacaagccgccatggtagagatgtacgcgcgtttggccgtgttcgctaatcagtctttataattaaaacgaatcagaccaaatgaaaaagagaaacattaccttgtgcgctgttgccatgctctgtatgcaaggctatgctaaggcagacacttttatcctgaaaggtgacaacacttgtgtggagaactatgctcagatgactgctgcttacaagagcaatcgtccaaaaatgaagaaacgccttttcacctcaaaagcggtggaagctgagattgttcgcgtgaagaaactgcttaccaatcctaagttggcgtggatgtttgagaattgctttcctaatacgcttgacactactgtacactttcgcatgctggacggtaaacccgatacttttgtttataccggtgacatccatgctatgtggctgcgtgactccggtgcgcaggtgtggccatatgtgcagttagccaacaatgatgcgcaattgaaagagatgctcgaaggtgtcattcgccgtcagttcctttgcatcaacattgatccgtacgccaatgctttcaacgacggacctacgggtggcaactggatgactgacttgacagatatgaagcccgaactgcacgagcgcaaatgggagatagactctctttgttacccgcttcgtctggcttaccagtattggaaagtaactggtgacagcagtatcttcgacggtgaatggatgaaggcaattactgctatcctgaagactttcaaggaacagcagcgtaaggacggtgtaggcccttaccgtttccaacgtaagacggaacgtgctctggatacgctgaataacgacggcttgggtgctccggtcaaaccggtgggactgattgtttccgctttccgcccatcggacgatgccactacgcttcagtacctggtcccttccaactttttcgctgtctcttctctgagaaaggctgctgaaattctgacggaagtaaacaaggaaacatccttggccaaagaatgcaccgatttggcagccgaagtggaggcagccctgaagaaatatgccacttacaatcatcctgagtttgggacaatctatgcatttgaagtagatggattcggcaatcatctgttaatggacgatgccaatgtacccagccttcttgctatgccttatttgggtgatgtggacgtaaacgatcctatctatcagaatacacgccgctttgtgtggagtggcagcaacccttacttttttaaaggtaaagccggtgaaggtatcggaggtccgcacattggttatgatatggtatggcctatgagtatcatgatgaaggcattcaccagccagaatgatgaggagataaagatttgtatcaaaatgctgatggatacggatgccggtacgggattcatgcacgagtctttccacaaggatgaccccactaactttacccgtgcatggtttgcttggcagaatacgctgtttggagaattgattttgaaattagtgaacgagggtaaagtggatttgctgaacagcttgtaaaaacaggaattatttaaaatcaataaagtgcgctggaaggaggattaggatacaaattgcatgaattggttgttcgttggtattatttgtgttcttttcctttttttatcgtgatttattataatgtttaatcttaaagaatatgaaaaagaatcgagtgtacacagtaaattcattgctggctcggataggtgggaactataagttctggcttattgccttgcctgctgtgactatgctggcgcaggctcctgcggtttatgcacatgcggagactattactgtggtgcagcaaaacaatgccacggtgagaggttccgttaaggatgccacaggtgaaagcctgattggagtgagtgttactgttaagggtaaagaaggtgtgggtaccattacagatgtggacggaaactattccattgtttgtagtgcccaagatgttctcgtcttttcctatgtgggatatgccactcaggaaattgctgtgaaaaatcaaaaacaattgaatgttgtcttaaaggaggataccaaggtgctggatgaagttattgtcatcggttatggtactactacccgcaagagtgccgtaggtgctgtagaccaggtaaaggcttccatgatcgaagaccgtcccgtggctaacatgacagatgctttgcaaggggctgcgcccaacgtggttatccagcagcgcagtagcaatcctaatgatcgtaagactaactttaatattcgtggtatcagcactgtgaatgacaatagtccgctttttgtcatagacggattggtagctgatggcggtagtttcgataaattgaatcccaatgatattgagaacatttccatcttgaaagatgccggtacagctgctatttatggttcacgttcttccaatggtgtagttttggttactactaagaaaggtaagaagaaccagcgtgcgacagttcggttaagtggtatgatgggatggcagaatccggatatcttgttttctccggtgaaaggctatcagaacgctactttgcgcaatttagctgccaccaatgctggagaggctcctttgtatacacccgatcaaatccgtgacctggctgcccatcaaaatgaagaaagctggttttttgatcagatagtccgcacagccttacagcagaattacaatctaagcgtatctggaggtagtgataaaactacttacatggtgtccatgggttattatgaccaggaaagtaattatgtgggcaacagtgattttggcgtgcagcgttataattttcgtaccaatgttagcacggaagtgggacgtttgaaactgaatgctattttggcttatacacgtaataatagtgtaagtaccaccggtgggagtttggaagtggatgccgcccgtgtacctacttattattattacaaaatgaaatcggaagatggaagatatttgttaaatgatgtattgactgaatttaacccattgggagcattggaagctggtggccgtaacaagtatcgtaacaattatctgaacgctaatgtcaatgctgaattccggcttattgacggattgaagttgcgtggagtgttgggtgcggatgtgataaacgacatgcgttctacccgcaatttgggcgtatcctattacttgaatgaagaggctaccgaaccacgtccagtgaaagatactgactatcggaccagtaactggaatcatacggcttaccttattaatagccaacttttgttggattacaacaagacattcggtaaacacaatgtcagcgggctttttggagtaaccaatgaatcgtttacttcgtctagcaatgagattgagaagaagggggtagatcccgacttgggtattggtacagacattaccaatagtactgtgggaaacatcacaggaaaaacatttgtagatgaatccaaccgtaccagtctgacttctctgttgggacgtgtggggtattcttacgctgacagatattatacagaattcagcttccgttatgacgcttcttccaagtttcataaagactaccgatggggtttcttcccttctgtttcattaggctggcgtttgagcgaggagaactttatgcaggcttacaaggaacgtgtgggtgacttgaaactgcgtacttcttttggtatcttgggtaaccagtctattggtacttatgaccgttttactgtttacgaactgtacaacaactcttacgcatacaacaaccagacagtatcgggcgcaggttttaagttaggtaaggataatttgacttgggaaaagaccaaaaccttcaacgtgggtgtagacgcttcgttcttcaataacgctttgaatgtgacgttcgactatttctacaagcgtacgagcgacattttaatgaagccccttgtgccttcggtatttggtacggatatggcgatggacaacattggtgagatgcagaatcaaggttgggacctctctatcaactatcgtttgaaaacgggagccgcaaatcataacttcaacttcaatcttggtgactcttggaatgaagtgctgaagtaccctggtcacgaaagaatctcacaaatagaggagttgagccgtatcacccgtgaaggatgtccgttggagtcttactacggttacaagatggacggctttttccaaagctacgaggagattgaggcatcggctattcctgtaggtggaaaggtacagccgggtgacgtgaagtttgtagaccgtaacgaagatggtgtcatcgactcgaaggataagtttatcttgggtaatgccttccctcgtcttactttcggtttcaactacaatgtagaatggaaaggattcgatttcggtatgttctggcagggtgtgggcaagcgtgacatgatgcttcgtggtgaattgattgaaccgttccacgccaattactcttataatatctataagcatcaactggatttctggactcctaccaacaccgatgcacgttggccgagacttactgctccgggttctacttccaacagaaacaactacggaaacggacaaggttccgacctattcttgatggatggaaaatacctgcgtctgaagaacttgcagattggttacacattccctaaaacatggagccgcaaggtgggcatggaaaaggcacgtatctatgtcaacggacaaaacttgctgactttcagtaataactcgtttattgaccctgaatcttctgagttcgactctaagatgggtaatagtggcgccaattctggtagaaactacccgacgctccgttactatggtttcggtatagacattgaattctaaaaacaacagataactatgagactaagaaaatatatagcttttgccggaatggctgttctgatgctttgcagttgcaacgagatggagaacgcaccgacaaacaaatttacggataactcttattggacttccaccaccaaagcccagtatgtggtgaacatggcttacagccagatgtacaatgcaggccgtatgtggagcgatgaaagtttgagtgacaatgcttacgacggtcgcagtgtggacgaccaacgtgccattcgcaaaggtatggctactccctcgctcgacatcttcaagaatgaatggaaagacctttacggaggcataaagacctgccacgtgttccttgaaaaggtggatctggtacccaacatggacgcatctgttaaagcacgtatgattgccgagatacgctatatccgtgcaagcctctacttccgtctgactaacctttatggtgcagtacctttctttacggaggacatcacgctggaagaatcgcggagtgtaagtcgtacagaccgcgaaaccattatcagcttcattcaccaagaattggaagacatcaaggatgcgcttcccactcgcgaccaattgcccgaagaagacaagggcaaaattactaaaggtgccgtttgtgctttgcaggctcgtgtctacttgatggatagcgactggaacaatgtgatgctttattgcgacaatctgatgaacaaacagggcgaatatggtacttatgccttatttcctgattatgccgggctttttgatgaagccaatgagtataatgaagagattatcatggaccgttcttatgtacccaatttgattacttggggtgagatggtagacatgattcctttgtcaagaggcggacgtgccgtgaaccgtgtgccgcagcaatcgttggtagacacttatctgatgcttagtggaaagactatcagtgaagccgggacagattataaccctgcttatccttacgacaaccgtgacccacgtcttaccgctactatcatttatgatggctatgactggagtggcaatgtggacgatggcagtaaagacgtagtcatcaacattcgtccgggttcgggaaccgatgcctacgatggtggtggaaacggcacttctaccggttatttcacccgtaagtattataatccgcaggctcccggtgaccagaattccggtatgaatatcatcactatgcgctatgctgacatcttgctgatgtatgctgaggctgttcacgaaacaagcggtatgactgaagaggtatggaacaagaccatccgtcccatccgcgaacgtgccggattcactgccgatgcagccttgaactttcctgccggaaagagcaaggaagagatgaggcagattattcgcgacgaacgtcgtgtagaaatggcgatggaaggtttgcgctggtatgatattaagcgttggaaggctggtaacgaatacttgtcgggcaaggtgcgcggtgcaagcttcgtggacgagaacaagcttgacactcgcaagttcgaagaggcaagagattacctttgggcagttcctatcagtgaaatcaatttgaatcccaatctggcgcctaacaatccgggatatggaaattaacgtgtatctaaactcattaaaaacaatagaacaatgaaaacaatattctcaacaatagctcttttttcggcagtcctctttgctacgtcttgtacggaagacatggaatacaaggattccaaagtttcctcagtaaatcagttgtatgaacccactgacggcaaggaagtagtcttgcaatcgtcggccagcgccagcctgttctttgaatgggagtcggccaaggctgaagatagcggtgcccctctttatgaagtggtattcgataaagaaggtggagatttttctaagcctatttacaaagtgctttctgacaatggcggttctttgagctatgctaccatcagccacaagacattgaacaaggttggtgcggctgccggattgaacagtggtgagacgggtacacttgtttggacagtaatggcttccagaggtttgaattctgtaatggcaaaggaaagcaagaagctcaccatcactcgcttggtgggatttgaagagattccggcacagctttacttgaccggaagtgctactgaaggtggtatggatgcttctaaggctgtggcgtgtgcttcacccgaaaaggataagttcgaagtctttacgaagttggaaggcggaaagacttacaaactggtagatagagcagccgaaggtgccaaggtgttttatatcaatggcaataagattatggaaggcgaaggcgagacaaccgtagaaaagacgggagtttaccgcattgagatggatttctccattgcatctgtaaccgtcagggaagtaagtaagatggaattctacttctgtccgagtggtgccgcaacttttgaattgccttatgttggaaacggtgtgttctgcggtcaggataaaattgagttcaagcaagaaggatgggggcgcgaccaacgctataagttcttgatgacttatgctgatggtagtatacagtattggggaaccaagaatactacagactctaatcctggtgcggctactcccgaagatccttatttctacattatggagactcctgataaccaatgggatcagaagtggaaactgaacgatgaattcgatggtgcggccgatggccacaatccgggtgccatcaccaagattagtgtgatattcaatgtggagaactatactcataaagtggaattggccaactaatttaaggagagattatgaaaaaaatattattttgtctgcccctgcttcttttggcacttcaatcgtgcgagatagaagatgagtatatgtatgataaggggctttacaccatagattgggatgcggctgccgacagcagttctgtgaccctgatagatcgtttctggaatacggaagagaattatttcaactacgggaatgacggttcaatcaaggatttccattattggccgcaggctcatgctatggatgtgatgatagatgcttacaatcgtaccggagatagcaagtacagcgacttgttcgacaaatggtatgtcggtatcaaggcaaagaacggtggcagttattggaacaacttttatgatgatatggagtggattgctctcaccatgattcgcttgtacgaagttactgatgaaaacaagtatctggaaacttctcaagagatgtggaatgaaatcaagaccggttggaacgattacgcaggtggtggcattgcttggactcacgaccggctatggagcaaaaatgcttgttccaacggtcctgctgctttgattgctgctcgtctttaccgtattaacgggaatcaggaggatttggattgggctgtcaatatttataaatgggagcgtgaaaatttatttaaccctgctaccggcgccatctatgataatgtgaacggtgagacgggtgagttgagtacactttctctttcttataaccaaggtacattcttgggtgctgcttacgaactgtataagatcacaggagaagagtcctatttgaaagatgctcgtaaggctgccaatttcggtatcagtaatagcagcatgatagatactggaaacaatttacttcgtgatgaaggcgatggtgacggaggtttgtttaagggtattttcatgcgttattatgtgcagttgattatggaaccgaatttggaccccatatataagaagaaattcatcactttctttaacaataatgctgaaatcttgtggcgaaagggaatcaataaacttgatttgctgtataatactaactgggcaatgaacaatagcggtaacaaccatttgactacgcagacaagtggttgtactttgattgaagccaaagctctctttgaaaagagcctgaaataagttagcaattaaaagtgtgtcgaaactcaatctggttattgggtttcggcacatttttttttagagccagttttaattggcagttattttggaaataatgtttttagagacaacagttttttatataaaataaacacaaaagatgaaacagaatcaatatttatttctactgttcgccctgattgttctgacgggctgtggcggtacgcagaagaaattaaccgaatatgtcaatcctttcttgggtacggctactttgtgggagcctgaggacttagggtatacgcgcaaaataaagtcacgtacatggggtgcggaaacttatccgggtgctaccttgcccaacgcaatggtgcagctcagccccgttacacagtttcgtagcggtgcgggctatcaatatgaggacactgtgatttatggtttttcacatacagctaaagggcattggaacttgttgcatgtccccatgttgccagtggtgggaactatcgctccgggtaattattgctccgggtttagtcacgagaaggaatctgcgcatccggggtattaccaagtttatctggaacgctataaagtgaacgccgagttgaccagtaccttgcgttgtgcctaccataaatatactttcgccaagggcgacgataagtcattattggtagacatccgccgttctaataatgatgtccgtgattggaagattgagaaggttgacgataatacgttcacgggttatcaggatggcgatggtaaaatctacttttacgctaagaccaactataaaataggccaagtggaaatggtaaaagacgacaaacatgaggtggctgtgctgcgttttatcgacagcaaaggtgttgaacctttggaagtgaaggctggtttctcgtttgtgagtatagagaatgctcaaatgaatttgaaggccgaaatgttgaacaaaagttttgcacaagtggcagaagaagccgatgcggcttgggaagcactcctctccaagattcaagttgcaggtggcacggaacgtgaaaagagattgttttattctactttcttccatgcttttaaatggccggctttgcgtagtgatgtgaatcatgaatatactgatgtccgtggcgaagtagtgaataacggcttccactattacactgacccttctttttgggacgattatcgcaacaaactggtactcataggtatgatttctcccgatgtgactactgacatcattaggtctattattgacaaaggtgagaagcgtgacggctacatgcccaccttcttccatggtgatcacgcttccacttttatttctggttcttggttgcgtggtttgcatgatttcgatttggagcgtgcttataagttgattctgaaaaatgctacggtgcccggtaaaggaggacgtcgctatttggatgagtatatggagcgaggttggattgctgaaaaagacacagtgaatgtacccacatgggacgaatacaaaggggctgtgaccaagacccaggaatatgcttacgatgactatgccgtagccttggtagccaaggagctgggagatgaagccaactacaagctgatgatggaacgctccaacaactacaagacgctattcgacccctctaccggcttttggagaggtaagattgacgatggtagctggattcaggatttcgatccgtattatccctattaccagtacatgtaccgtgaggccaatgcatggaacgccctcttcttcgccccccacgaccccgaaggcatgattaagctctatcccagtaaagaggcggtggaggctaaactggattccttattcagcgaaccgtggagaggttacgaggcccacaacctgaccggattcatcggaaactattgccacggaaaccagccgggacacagcattccttacacctattatttcatagacaaacaagagaaagcccaatgcattctcgacagcctgatgaaccactactatgacatgggtgccgacaagctggcttatgcagggatggatgatgccggcgagatgtcttcgtggtatgtgctcaatgctattggactttacacttattcgcctgccgatcctgaatatattgttactgttcccttgttcgataaagtgacgttcaatctgaatggccgtccctttacgattgtgaagaaaggaagcggcaagaagattattgacattacttatgacggtaaaaagattgacggttactttatcacccatgaccaactgagggagggcaaggaactggtgattactacggaatagataaacaatggagttatgaaaagaaatatactgcttctattcacattctttgcttgcattactgtacaagggcagactccggttcgtttggttgatctgaggagcgaacatcttgacagacctataggtttggataatcccgttccacgcctttcttggcggatggaagatggtaggcagggagctgtgcagacttcctggcggattgtggtagacgaagactcgttgaatgtggccaatggctgtggcaggatgtgggatagtggaaagaacgattcccgtaatctgcttgtggcctatgcgggcaaaaaactgcagcctttcactagatattattggaaagtaatctgcagtgacatgaaatataaggagactgcttctcctgtctcttactttgaaacgggcatgatggggatgcaacattggcaaggtgcttggattggcgatggcaaggatattcattatgggcctgccccttacttccgaaaagagttcaagaccggcaaaaaggtaaagtcagcgcgtgcttatattgccgctgctggactatatgagctttacatcaatggcgagaaggtaggagaccactgccttgcccctctttatacccgctttgatcgccgcaacttgtatgtggcttatgatgtgacttcacaattacagaatggtgacaacgctattggcgtacttttgggtaacggctggtataaccatcaatccaaagcagtgtgggacttcgaccgtgccccttggcgcaaccgtcccgctttctgtctggacttgcgcattacttacaccgatggaagcgtggagactattcccaccgatctcagttggcggacagcgtcgggtgcaatcacttttaatagtatctatactggcgagcactacgatgcacgtctggagcagaaaggatggagcactccggaattcgatgattccaagtggcgcggagtagcctatcggagtgtaccttcttccaatgtcactgcccagcaagtacatcccatccgtaatgtaaagattttccccgccgtctctttccgcaaagtggacgagaaaacatacatctatgatttcgggcaaaatatgtccggtgtgacttgtattcatgtttcgggtgaacggggaacggaggtcagaatcaaacatggcgaacgcttacatccaaatggccgcctcgatctctcgaacattgatgtctactttcgaggcgataaggagaaagacccttttcagacggacattctcattctgagtggagaagaggatgagttcatgccccgatttaattacaagggatttcgttatgtggaggtagtggcagataagcctattgagcttgaccaaaacagcttgattgcttacttcatgcacagtgatgtgccggcagtaggtagcttggaatcttcgagcccactgataggcaagctgctccatgctgccaatcactcttacctttccaatctgatgggctaccccaccgattgccctcagcgcgagaagaacggttggactggtgacggtcattttgccattgaggcagcattttataactttgatggaattaccgtttacgaaaaatggttggccgaccatcgtgacgagcagcagcccaacggagtgctgcccgatattattccaactggtggatggggatatggtacagacaatgggctggactggactagtactattgccatcatcccttggaatatctacctcttctacggtgatagcaagcccttgagcgattgttacgagagcatcaaacgttatgtggattatgtggagcgtatctctaacaatcatctcactacgtgggggcgcggagactgggtgccggtgaagtcaaaatccaataaagagttgacttcctcagtctacttttatgtagataccaagattttggccgctgctgctaaactcttcggcaaacaggccgattacgaatattataatgccttgtcggaggaaataaagcaagctgtcaatgataagttcctgaatcgagaaacaggcatctatgccgaaggttcacaaaccgaattgagtgttcccttgcaatggaagattgtgcccgaagagttgataggaaaagtggcagctaacttggcacataaggtggaagaggacgattttcacttggatgtgggtgtattaggagctaaagctattctgaatgcactcagcgaaaatggttatgctgaaacagcttataaggtggctgtacaggacacttatccttcatggggttggtggatggtgaacggtgccactacgctgctcgagaactgggatttgcaggctattcgtgacatctcggacaatcatatgatgttcggtgaaataggtgcttggttctacaaggggctgggaggtattttccctgatcccgcgcaacctggttttcaaaacattctgctccgtccccatttcataaaggaattgaaacggtttgaagctcgtcatcggtcgccttacggtgaaattgtttctcgctgggaatggaaagggaaatgtgtgcattatgaagttacagtgcccgctaacagtacagctacactcactttacctgacaaggccgagaatgtacgggtggtggaactggcggcaggaagatatgagtttattgtaaagtgaccctgtacttttcatttatgcttgcaaatatgtaattagcgggtttgccacgttattgtggcataactcgctaatttttatagtcggtatgttaagggatggctttttcattcttatagcctgatctttccctccaaccgtatatcttccgacgaagcccctatcagcagcttcaccgttccgggttctacaacgaacatctgctttccttcgttccaatagccgagctcctctttgggaacggtaagcgtcacttcccggctttcaccagccttgatggggatacgcttgaaggcgcgcaactgcttggaaggacgttccactttggagtccggatagctggcatagagctgtacgacttcttctccgtcgcgtccgctggtattcttcactgataccgtcacgcggatgttcttcttgtcttgcttgacggattcaatcttctcgtacgtaaagtcggaatagctcagaccatagccgaaaggatagagcacagggccttggtggtacatatacgtacgtccgttgcggatgtcgtagtccatcatgtcgggcaggtcggtgatgtctttcacccacgtctgtacggtacgtccggctggatttaccttgccgaagagtacgtcggccagtccgttgccctgctcctggctgcagtgggtgatgtggacgatggcaggcacgtgttcctggctccagttgatggcgtaggggaaactgctgacgagcaccagtatggtattgggattggctttgagcaccagtttcaccaagtcttcatcgggcaacatcagcgatttgcggtccacggcttcgcggccgtcactggggacgggggagaacttccagtccgcacgtgtgccgtaaggatggtttcctacacatacaatggcgatgtcggcggctgcggcagccttttccgcctggcccatgcggttgtcttcggcgtggatgatttcggttccttctttcacagcattgcgtatgccactcagaatcgttgtttcgtaaggcggggtaccactataccagtcttgtacgattttgtccgaatacgggcctataacggctattttacgcagctttccggcatcgagtggcaggagattcttgtttttcaataacaccacagacttggcggtgacttcccgtgccagcctgcgggcttctgctgtcatgaaaggcggtgcctgcgtactgtcctttccgatggagagataagggttacgggagtggtccccgtccagcaagccgagcttgagggcgacgaagatgttcccgcggatagccttgtcgatgtcggcttcggtcagcaatcccttttccagcgcttccttgacgtaaggaacgtatacgtcgagaaactgtcctgtggtggcttttactacggcagcggcgccctccgcaaagctcggaaaactcttgtgcgcttcaatcagcagtttcagggcaccaccgtccgtacagatgataccgttgttgccccactgcttgcgggtaatctcttcgaggcagggatggatggacatggggatgctgttccaactgttgtaggctgccatgaaggcacggctgcctccctcggtgatgcctttatagaaaggataagcgtagtattcatggaacagccgcgtgtcgaagtcggaggaagtgctgtcccgtccgtcctcgttactattagcaaggaagtgtttcatcagagaggcagttttccagtagcggggatgattgccttgcaggccgcgtacgctggcaatggtgagttgggcggtgaggaaagcatcttctccgaaactctcctcggtacgtccccagcgcgggtcgcgggcaaggtcggcattcggagcgcgcatcacgagggcatgacgcttgttgccggtggtctgcatgtagtagcgggcttcttcagcagcttgttccgctactttctgcaccaaatcggtgtcccatgtggagcccagaccgtaggattgggggaatatggtggtggggcagtctgtggggactactttcccgtcttccgttctttggcgtccgccccacatggcaggcccgccgagggtcagcccgtgcagtccttcgtagtgtccgcaacggggaatgttgaggcgggggacaccgaggtcggtggaaagaaggtttatcttttcatccaatgtcaggatggaaagaagatggtccacgcgctgttcgtcggtgagcgtggtatcttggaaggcttgtgtttgttgtgcgcttgtctgcaggcaaagcagcagagagaaaatgaggagtagtgacttgtttctcatggttcattagggtttaatggattcaatgtagtgggttgtcataacaaacattcttggttgttatctcaatctataccttttgtctgcacgagatatgcatctcatacatgaaaggataggggattatgggatggacattcgttgcaaccgtccgtcctgcggcaggcagagcaacccttcggctttcttttcgtctgccagatacttcttccacgtaatcttgtcccatttcatctggtctgtgcattgtgccacggggatatgggggatggccgaaccgtcctttacaagaatgacgatgggcagggtgccgcactcgatatggttccatcccggagcatacacctttccggtctggtagtctatccatttctgccgtccggggaggtagacatcccgtccgctgccctcttcgagcatgggtgccacgaggagattggaaccgaacatgtactcgtcctctaccagccatgcacccgggtcgtcgggatactccagcagcagggcgcggagcatcggccagccgttttcggtgcactctttggattgtgcatatacgtagggcatcagtttgtacttcagttcggcacaacggcggaaatagtctgtgaactctttcccgtagtaccacggctcggtgggaggtgctccgtgcacgcggctgtggctggtgaggaagccgaagggcagccagcggcggtagaggctttcggggctttgggtcacgaagccacctatgtcattgctccagaaacagaatccgctcagtccgatggagaggccgctgcggatggttccctcgaaaccggtttcggtagtggcggcgtcaccgccccagtgcagcgggtagcgttgtgagcctgcccatgcggaacgtgcccagataatgttttcgccgtgtatcttcttgattacctcggccacggtcttgttgtagcgcaggggatagaggttgtgttcgtatagtccgctacggccgttggcatagatggcatccagtggggcaccttcgccgaagtctactttgatggcgcctacacccatttcaatcaggttgccgagcttcttttgataccactgcacggtttcggggttggtgaagtccagcaccacgtcctcgtaggggagctgtcccttgccgttgcgcacgtacagaccgcgttctaccaactcagggaagaacttgtttttcggagtgaagtagggaagttgccagaggcaggtgcggaaaccttgtgacctcaggtcggtgagcatctgccggggattgtcgaagcggtcggcggcaaaggcgtagtcgcattgccagtccacgccgaaccagccggtatcgaagtggatgacatcgctcggtatcttgttctcacgcagtttccgggctacatcgcggccctctgcttcgctgaagtaggtgatgcggctcatccaggtgccgaagctccacaaggggggcatttcgggccgtcctaccagtgcggtgtattcgctcagcatctccttcggcgaacccaggaagatgaagatgtccatcgcttcgtctgccatgaagagtttggtggctccgatgtaggaacagccgaagtcgcaggtcacgggggcggaagtgtgcatgaacatgccgtagccacggttgctgaagaagaagggtatgggcttgtacatatccggggtttcgggcccttgtgggtcggtgacaaagaggttgactttctgtccggccttgttcagtgcggtggcagactcgccgcaaccgtagattttctcgttcggcgcgaggctgaatacgggattgatgctgcgtgagttgtccgagccgcgcttgatgaagctgaatggaggtaccttgacctgcgtagagtcgttgtcgctccagcaacgggtctgtgtcagcaggcgtccgtcggcatctttcagtaccagacgccagggatagttctggatgagcaggctgccgtatcgggaggtgtacagcgtacctttgtccgtcttctcggctttccagaaggagcgtccgtcggcgggcttccctatgagcatggggtcgtcagtatcttctttcggcacgatgggcgaggtgagcatacggatgcggagggtacgttcgctgaccggctcgacggtgaacgtcagttgcgggctgttgtcgtaggcggtctccgggaagtccaacgactggaggggctggtgcaggtaggtgtttgcattgaatgcctggcggggcatcagttgctggcgtttccactggacagtccctttaccggtggaggtgtcgaacgataccagactgtcggcgaagaaataggtgttgctgaggtccagaaaatcctggctcatgtctttcgactgggaaagcaggtattgcacgccggcatttgttttcagttgggcatgcgcaggcggggtggcagttgctgccagcagcataaaagctgcccctttcatcagttgtctctctttcatgataaatatatgatttacggttactgtttcgatgccgtaaaagtagagaaatccacacagatgaaaggggtgggtatgttgcttatgtagggctgaaatgtttatttggaagctttcttcccgtagaaacacatgaaatataccccgataatcacaaacgggatactgagccactggcccatgttcagcgtcatgctgtcctcaaagttcacctggttttctttcaggaactcgatgaagaaacggaaggtgaaaatctccgtcaggcagagtccgaagaagaaaccgcggtgatagggcagggaggcttcggcctgcacggtggttgatttccgcttggtggtgctgaaatctgtttcgagcttggtctcttgtttcttctgtccgcgtttgtatagccagaccatccccaggaagaagatgaagtaggcgatggcttcgtagagctgtgccggatggcggggcagcatgtcttcgcgctcgaagatgaatgcccagggcacgtcggtcggtttgccgatgatttcggagttcatcaggttggcaaggcggatgcagcaggcggtgatgggagtggcaacggctatcatgtcgagcacgtccatgtagtgcatcttcgtcttgcggcagtacatccagagggcgataatcaggcccagcgtgccgccgtggctggcaaggccggtgtaacccgtcattttccatcctgcggcggtctgcttgatggggagaatcatttcaacgaagtggtcttggtagtaggcccagtcgtaaaatatgcagtggcccagtcgtgcgcctatcagtatgccgaagaagcaatagaagaaaagaggttcgaatttcttttcgtctattttgcggtcgcggtactggtgttgcacgataaggtaggcaaaagcgaggccgataatccataacaaaccgtagtagcggatggatatgccgaagaagttgaatagttcggggtcggggttccagttgatggtgagtagtgataacatatttatgaagaattaaattactgaattacggggttgttcgggacaaaggtatgaaattatctcgtttggcagttcatcgtggcagtttatttgaatttctccgccaccatcctatacgtcggcacctcaatcccttgttcctctgcagccgtaatcatgtcgaacaacaagccttgtacttcgctctgatgtcctttggccatatctttctgcatggaggcggtactttcgggggcgagtttgtctattactttgaggttatactgcacgatgtcttccttgaattctatacccaacttcctgcccaaagctgcactctcttgtgacagtccgataaaggtgtcgcgcactttgcccggtttctggacttcgcccataggtacgtcgtaataggctccggtgacggccatagcagaaatgaaggaccacttgacgaatgtgtcccggttgatgtcgttggagatttcggctttgatgccgctttcctgcaaatcgcgttgcacggcttccaatgtttcacgggaaacaatcgtgccgcggtgtgctccgtagacgagccggaaaatctttcccatctgcgtgatttctccccgtccggatacgaatcctacgatgtagatgcagccgtcgagcactgtgacgccggggaccaaccgttggatacggggaccggttccgtaaacattcaggatggggattaccactgtacgctcgtgtgaggcacgtttgatgagttccgtaatggagtctacggaataacctttgacgcagacgaagataacatccgctttgccttggaattcttctgcggtaaatgtcgccactttcagacaatgttcacctttcaaatcggagtgcagttgcagaccgttcccgcgtatggcggcaaggtgttcgccgcgtgcaatgcaagtgacgtctttgccggataatgaaagaaaggcggcgatgcttccgcctacgccgccggtacctgctatgaggtatttcagattactgtttgccatttgttgtgtatggtttattgaacgtagttttccttttccatatagtaaagcccttcgccccggtcaccgttctccatgtcttccagctctactttgaagatacggtagggaaggtcttttctgggatgcttgggcatgtctactgtcaatagataggcgttgccatattcgttgctgtcgaaatattcttttatttcctgcttcatcagcacggggactttctcgccgtctatccagacggtgactttcagttgcccggggcggggagccatctggcattctttggcttcttcgttttgttcttgttgctcaatgtcactcaggttttcaccgtgtaccaatgactcgggctttgtttctttcatccattggtaggtacgtgtcaagctcatgggacggacgtatatctgataagtaggcatggctccggggatgcggaaagcacgcaggccataagcttccatacgatgataacgtatgtcgagtgtagtgtcgcggtcggcgatgaaatcccaggcccagaactccaggcggtgttcagtttcgggcagcccgcttttcatggcaatgtgcgcataggagggcagataaatagaggctgcactttgatatttccctttgggtatacgggccgtgtaatgcccgtctttgtcggttatggcttctatgatgtcattgaactgcgggttttgccaccagatgctggcactgtctatcggttgtccgttgtaatcagtcacccgtccgtgaatggttaccgagtcttgctgttgtgcataaacggcagtataggacaataagaataaaaggaagataatctgtttcacagtattgttattgtatggagtttattagaaaatggcaatgtacaaagaaagtacattgccatctggaatgaatatcattacacattgaacctgaagtgcatgatgtccccatcctgcaccacatactccttgccttccacacccaactttccggcttcgcgcacggctgcttcgctgccatacttgatataatcctcatacttgatgacctctgcccggataaaccctttctcgaaatccgtatggataacgccggcgcattgcggtgctttccatcccttgcgataggtccatgcctttacttccatctctccggcagtgatgaaggtttcgaggttcagcaggctgtagatagctttaatcaaacggttgcaaccgctctctttcagtcccaggtcttcgaggaacatctgtttttcctcgtatgtctccagttcggcaatgtcggcctcggtctgggcggagatgatgataagttcggcatcctcgcccttgatggcttcgcgcacctgctctacgtactggttgccgccggcggcgctgacatcatccacgttgcagacatagagcacgggcttggtagtaagcaggaacatctgcttggcgcattgttcctcgtcgtcgttctgcgggatgacggtgcgggcgctttgtccttgttccagggcatccttgtagcggagcaggagttcgtactctatctttgcagccttgtcgccacccaccttggctattttctctacgcgcttgatgcggttttccacggtttcgaggtctttcagttgcagctctgtgtcgatgatttccttgtcgcgtacggggttcaccgagccgtccacgtggacgatgttgccattgtcgaagcagcgcagcacgtggatgatggcgtcgcactcgcggatgttgcccaggaactggttgccgagtccttcacctttgctggcgcctttcaccagtccggcaatgtcgacaatgtcgcacacggcgggtacgatacgccccgggtgaaccagctcggcgagcttcgtcagtcgttcgtcgggtacggacacttgccccatttgggcgtcgattgtacagaacgggaagtttgccgcttgtgcctttgcgctgctcaagcagttgaaaagagtggattttcctacgttgggaaggcccacgataccagcttttaatgccatagtgttatcttgttttttagttattgttcagttaattggatgcaaagatagtgcaaaccgaaggcagaatgaaatgaacgcgttcattttttatgctgaggtgcagcctatcttcacttttttaagcaaagatagtacttaccggggaaagtgggtatgttaatttgcattaaaagcacgagagtaaaatgataaattgatagttttgtcgcaattataaatttaagtatcattctataaatcaatgcgattatgaaaaacaaagtaagaaaaattctgatgattttctcatgtctcatcggtctgtcttttacattatctgcacagaatccttatctgccgctttgggaatttattcctgatggtgagccctatgtgtttgaggatcctgactgtcccggcaagtaccgtctttatatttatggttcgcacgataatctcaagtggatgtattgcggacgtgaccaggtggtgtggtcggcacccgtagaggacctgacccgttggagatatgacggcgtgatatttaaagtcaatgagtcgcccgaactgtataaactgaatgctgatggaaccgacgacgtgctttttgcccctgacgtgacagtaactaccgatgccgatggtaagaaaacttactacctctttccgaataatcaaggtggtgggcgcaattccatgattgccaaaagcgaccgtcccgatggcccgtttacggtatgcaactggcataaggagcgtcctcgcgagactttcggttgtttgggattcgaccccgcagtgtttgtcgatgatgatggacgtgtgtatggttattggggatttggcatttcgcatggcgcggagttggaccccactactatgtgcacggtaaagccgggtaccgaagtggtggagaacatgatttcaggctatcggcaggaaggtatattccgcttctttgaggcatcctccatccgcaagattgaggataagtatgtgtttatctatagccgtactaccgctgagggtgaagatggcttgccgaatgccagcaactatacgctggcatacgcttatagcgagcatcctctgggtccctggacctatggcggaacaatcatcgatgcccgtgcgcgcgagtatgatgaaaaaggcaatgtgatagcttcggccatgcccggtggaaatacgcatggcagtatctgcaagataggagggcaatggtacgtgttctatcatcgccagataggtactgattgctatgcacgccaggctatggtgtcggccattgatgtaaaggtggaaaaaggaaaaggtgggaaagtcgtgatttcgcgcggggaattcaactctgagggtttccttcttgaagggctcaatcctatgcagcgcatctcggccgggttggcttgttggcacaccaatcccggaggtatcaaagaggtctatccccattatgtctacacggggtcttacatccggcctgtgtaccgggataataatccctatgccggcgataacaaccacaaaatcccgttcgctccggtggtgaataatacaagcgggtcgattgtaggatataaatacttgaatatgaatgccgttccgcgagataagtctttgcagatgcagttaaggttgaaggctgaagataccgacggacgcatccgcatcatgctgggtagcccttggacaacaaaaggcggtgtagagataggacttgtggatgtgaaggctggcagcacttgcagggagttctatgctccgctctctattccggcaaagctgcataagggaaagcagccgctcttctttgtcttcgaatcagagaccgaaggccagtccatctgtgagttttatgatttcctcatgttggcacgcccataagtctttatacttatggaggcggatacttatcttgtgagaccttctaaatagagctattgtattagttcacagtactgaacactttgttacaccccgtcggaacagattgtttctcttgtatgaaacgacttgtttcgacgggataaaacgatttgttccgttataggaaacactttgtttccttatagagaacactctgttccattataggaaacaaatcgtttccatagtcggaaatgaaatggggcatatgcttcattgataccgctattacttttcctcctcgaatattcggttgaaaacttgccgcagccgtccttcgtctgcgataatggcttggagcttcttcagctgttccgcattcttgccctcgggaaaccagagcttcagataaccgccgggtgcatactttgccatgagatgctgatggaaccgctggtagtgccactccttgtcggcggcaggattctgtttcaagccgtattggacggtgcggcgcagggtgatgtccggatcgatgatacggtctgcttcggcaacaatcttgccgtagatgccgcgaggttcgtggtctgtggaggcgcggtggtcctctacggcttctttcatgaggagtatttccgtatcggagaaccattgccgcagggtgtcgtctaccatcagtatctcaccggagacaaggtggtgggtggcgcggtcgcggcacagtcccgtgtcatggtaggcggcaatgacgtatgccaggcgttcgtccgcttcgggatattgccgggcgagggcaaggctttcttcgatgacggtgcggacgtgtgagaggttgtgtgctttgtcaaactccttgtaccggggaatgattgctgtctcgatgtaggtaatgaggggcttgggtatcatgtggcattcctttttcgggtaaaggtacgaataataaccgatagctgaataacgaggagcagggaatggctcataatcaggtaccgattactatctgtctgtttacttaatgttccaaagactgctcgtagcttttcccgttggcgtcagtcaccacgatttttattttctttgctttatcgctcggttttgtagaaaaaaagaaataagcattcttgttagcttggcgaccacgttccttcatatcctttccctctgtgacagctttgcgctgcaggaagaaatcataatcaggatccatgcctttatactgcttcatttcgcctttcaacttcccgtcttcgtagtattccactttccagcggttatcccaattccataccttgacgcagagttcgtcttcatggccgggtactgtacccacgggatagtaacggaactgatagtcacggtcatgtcctaatgacttgaaataatttgcaattccgttcttgccggattcgaatacttggtagccaataggggtaccgtctttgctatagatgccgtcccataaccaccacgcgcctccgatggaggcgatattgtactcacgaatgttgtttctgatttgtgtgttgcattgtacatgagtgtgaccactgagaatatctaccttataaccctcgaaaaggtcgagtaactcggctacgcgtcccaacttgtagttctcgttatagaagtatgccggagcatgcatgcaaacaaacagatgagcccctttggggacgtactgcagatagctcttcacccaattgagctgctgatcattgagccccacctcatacttcttgtttcctttataaaggatattgtccaaaacgatataatagtcttttccagcattgaacgcatagtaagtgggtccaaagaaatgccgataaagatgtgcactggcatcatcgtcgctcacctccttgtcgtggtcgtggttgccgataaccggatagatgggaatttggatctttgctatctcttgcttgatgtggggaaacatttccaggttatcccataagatgtcgcccaagaagatggcgaaagcaggaatattctggctcatatattcaaagcccacttgcttgaggtcggggaaagcttccgtttcaagccgatggaatgcgttctctccgcgcggttgtgtatcggctgctgccatcatggcgtatttgcctcctactgttccccagcgatggagctggaaatcgtggctgttctcgttcagagtcttatagaagacgggagtacccccgttgcaaggagccatatagcctgaaggtgtcactacatagataaagtgggccttctcatcagcatcaatcatatagcttccgtcttcactggtaagagcgaatgcggtgccatcggttactacaactttggccagccccttgccgtcggccatgactttgcctttaatctctttagcttctgcccctattgccataagcagcaatgcggcgtaaaaaatgttctttttgttcattgcttttctctttcaattatttgttgtttgaattgagagcaaaaataggtgagtgaaattacttcgtcgtttctatggggttacgttcaagttacatatgtcgggctctcatccggtgtcatatcaaaatcacagaagtgacacaagtctgtaatacagcatccattcttttgcagccgaaattaaaatcatcatagaaactaatgaaaacaagaatgattaaatcctttgtgtgtgtctgtgggctgcttgtttcgttgaatgtagtcgcagcttcactgaaacccgtcaaaggtaaagtggtggaccggttcaataatccacttcccggtgctacaattcaagtgacccattctcccgagaaaaccattaccgatgtggacggcaacttcaattttgaaaccatcgaagacgcggaactcatcgtatcctacatcggcttccgtaccctcaagctgaagactgcaggggagaacttcattcatgtggtactggatgaagactcacaattgcttaacgacgtggtagtggtaggttatagcactaacaagaaggttaatctgtcaggctcggtttcttcgcttaacagcgagaagcttgcaagccgtcgagtatcaaacgtatcttcggctctgcaaggcatggctgcaggtgtaactgtcactacacagagcggtgagccaggcggcaatggcggtcatatacgtatacgtggtatcggaaccttcggtggtgatagtgccgccccgttggtgttggtcgatggcgtagaaggaaccatagatgaagtggatcctaacatcatcgagtcagtgtccgtcttgaaagatgctgcatctgcatccatctatggttcacgtgctgccaatggtgtcattctggtgactaccaaacggggtggcagtcaagacaagttcagcatatcctataaaggatattttggattccaaggcgcaacgatgcttcctcaaaaagtggatgcattggaatatatgcaattagaaaatgtggcagcaggtaacgacggatccgacctgccctatagtgatgaatatataagggaatatgtggctggcatggctactgacccggacatctatcctaatacagactggcaggacttgattcttacagaaaacggattcaaccatgggcatacgcttactctgacttcttcatcagaacgtatcaagacacttacttctatagggtatctggaccagacgggtatagtggtcaattcctcttaccgtaaaatctctgtacgcaacaatatggacatcaagcttagcgaccgtctggacatgaagtttgacatacaagtaagcaatgccaataaaaatagttctccctacgaaggacatgccttcaattatatgaacacccgaaccccgaacattgtcaatcaatttactactggtctttataatggggcaaatggtctgatgggcaataaccccgtgctgttgttgcgtgaaggcggtattgtgaaaaacaatgttatccgtgctaccatggcgatggctctgacctataagattctcgatggatggaatgtgtcagttcaagccactccacgttatatcaccaagaataaccataactataagaattctgtcaccacgtatggtgacccggaaggtactaccagcttcaagagcggcgaaacctacaactcgcttacagaatcggcctaccgttacttctactggaacacacaggcactgaccaactatgagaaacagctggatgaccactacttcaaagtaatggcaggtatggagtgtcagacctatacagaaaagactctttctgcctatcgtcaagtattcaacttccctcaatatgaccaaattgatgccggtaacattgagaacatgaacaatggaggaggggagtaccaatgggccatcaactccttctttggccgcttgaattacaactacaaggaacgctaccttgtggaggccaatatccgtaccgacggttcttccagatttgcagagggtaaccgatatggcgtgttcccttcattctctgcagcatggcgcatcagcgaggaaccctttatggaatctatacgcgatagagtggataatctgaaattacgtgcctcttggggcaaactgggcaaccagaatatcggaagttcctattatcccactactcagcaactctctacgggctctatatctatgggaggtaatctttacacgacctctgctgttacctcgctctccaatagggaccttacatgggagacttctaccatgactgacttaggcatagatctttcactgttcggctgtatcaacatcactgccgactggtataggaagataacggatggtatcctgatgaagctggacatccccaaccacattggtatgggtgctcccttccagaatgccggcaaggtaagaaaccagggatgggagctaagcgtaggctacagcaagaagctgacgagggacttttcgctggatgccgcccttacgctgagcgacgtgaaaaacaccatcaccgacatgcggggcacaagcagcacaagcggtgatattcgtaaccaagaggggtcttccattaactccatttacggattgatatgcgacggtttcatcaattcacaagaagaagcggacgaaatcaatgccaactgtccccaattcggtacaaccgtatatcccggtgacctgaaataccggaatgtcagcggagacaacaaaattactacagatgacaagacgattatcggaagtacagttccacgctatagttatagctttaatttaggagtgggatacaaaggaattcgtctttcggctttcttgcaaggagttggcaaggccgacggttatctcaattcctactacgtgatgccttgctatcagggaggaacctaccgcaaggaacaccttgactattggacggagcagaatcatgatgcatccacgcctcgcctctcttataagagcagtaacaacacctatacatcatccttctggatgaagagtgccgcttacctgcgtctgaagaacctgcagctgggttacgacctgccctccaaatggatgaaagccatcggactgaagtctgcctacatttatgccaatgctgagaatctcttgacttttactgacttttgggatggctatgaccccgaagtcaactataacgcatcagcaacagatggggtatctctgggtgcggcaaacaattatccccagacgaaagccttcacttttggcgttgacatcaaattctgattagccggaatagggaaaccgtctgtattcaagaagacataaaaagaaaaaatgatatgaaacgaaacaatatttatacagcactcctttcgctgtctctattaagtctcggtgcttgttcactcgaccttgaaccactcacttcaccgtcttctgcctcttatccttcgagtatggaagaggcgaatttcggtttgaacgctgtttactcatctctgacagcttatagtgccagcaccaccacctggtggaaggtgacagacaatattaccgatattggtgctacacgtgtcaacacggctatgtatacggaattaatcacctccggagcttctgctgaaaacgcggtggcaaacaagctttataattgcgtgtataagaccgtggcacgtatcaaccagcttctcgatgcgctggataatctgcgtggcacagcctctgatacggatatagagagtatacgggcagagctgctgtgcatacgggcattctgttatgatcaagcttgccagcactatggagacttgccgtatgtggtccacacagcgggtataaatgacagccagaccccacgtacaccgagagagaccattgtagagaatctgctttcggatcttagcgacgagtgtttggctaaccttccactccgccataaagcagaaagctatggcagtgcacgcatcggacgggtagcagcgtatgcgttacgtgcccgtattgccttgaattggaaaaagtatgacttggctgccagttcggccaaacaagccttgaatttggctaaggaggcaggctttgaattggaatccatcaatacacagtattgtggagaaagtcatgaggcaggagagccaaccggtcagacggctctgtttggttatgacggtgaggcaagcaatgagtggctctggtccgtgcagtatgatgcggtaatatccagtaataaaaccaaggaggcatattacatggctccacgtacactgggaggatgcgcctattttggtcctacacaaacatttgttgatatgtttcaatgcaaggatggcaaatcgattacggaatcttctctgtatgactggcagaacccttggcaaaaccgggaccctcgtctggatcttttctgtttgcgacctggttcacgcatattcaatctagaattccagacttccactaccagtaaaaagattcacgactatagcacgggcaaggacgtgacaaacatggagtcgcagggaaccaagggcgtatacggtgccaatggcactaaaggtcctgctggatatctctggaggaaatatttggatatagccgagttggaaagagctgcaatctccaaccatgaaaccagtgatcttaattgcggcttgatgcgtttagcagaggtttatctaatagaggcagaagccaatattgaaatggctgatggcaatctggagttagcacgaacggacatcaatataattcgtaatcgtgtaggaatgcccgatgtggtagttacttcgcagagcggactccgaaaggcattacgttacgaacgtactgttgaactttgtaatgaaggttttcgttggtttgatctccgtcgttggggtatggcttctacagtgatgacaggtaagatttatgctcccaatcaaaaagggcttatgtccaatgccaagccttcatttgatgacaactggcatccggcatattcagaaggtagttcttgggatgggaaagcactgaatctccgtgtgtataacacgatgaagtatatcaaaggaaaggatgaactttggccgcttccccaaagtgagattgatacaaacagtgccattatagaaaacaatccaggatactaatcgtgtaaggttattggtatctgacggaaaggatttgtttttcaagatataataaaagagccggaatgtgcgaatcattccggctcttttatgaaaggtttcggttattgttgttaggaataagatttcttactttaagagagagtttgtcaattacatgttagggttgtccatgattactgtcatctcgggaaccagtatgtattcgcctttcttgttgttccatttgtagtatgtggtagtcatcgtcttgccttggtatgcatagcggatgcacatgtccttgccccatgtattcttggtgctgttccatttcagggcttcgctttccgtcatgcggttctggtcgtcgtacttataattgtacttcatatagttggcaagcgtgtttccgtccatcttgtatacggtctctgccaccttcatgccatttacttcttccgaattgtaaatgaggttgctcttattgtcggctgaggcatttaatccgcaaactaagagaagtgctgaaacaatcactgtttttaaagatacttttgctttcatggttttatgtcttttttagtttaactttctattttctatcaatatgttattgatttcgctgcaaaggtacgtattaaattgacataaatataaatatcggattaaattttatcaatatgtcagtagtgagggtttcggtatgctttccttttggcaagattggtgaataaaaaatatccggcagcgaggttgccggatattctgatgagcaaactgtatttggaaaggattgcttctgttgctttctgattgtaagttaaataaagttattgggctgtttagtgtgcctgcaaccagttgtttccccacccacaatcggctttcaggggtacgtgcatgcgatatgcctgctccatctcttcgattacgattttctgtacaagctctttttctgcctctggaacgctgaaatttagttcgtcatggacctgtaaaatcatctttgctttcagattgtaagcttggaagcgctgatagatgtgtgccatggctacttttatgatgtcggcggcacttccctggatgggagcgttgatggcattccgttcggcatagccccgtaccaccccgtttcttgagttgatgtctggcaggaagcgcttgcggtggaagatggtttccacatagccgttctcgcgtgccacttggatgcttttgtccatatactccttcacttgtgggtaggtttcaaagtagccgtctatcagctctttggcttcctggcgggaaacgcccatgcgttcggcaagcccgaagacggagatgccgtagatgatgccgaagtttgccgtttttgccttgcggcgcatgtcggcggttacgtcgtttatatctatcttatatatcttggcagcggtggcggcgtggatgtcgtgtccgctgaggaaggcgtctatcatgttcttatcttcgctgaggtgtgccatgatgcgcagctctatctgcgagtagtcggcagagaagaactcgcagccggtgtcggggatgaacgccttgcggatttcctttccgtcttcgtcgcggatggggatgttctgcaggttgggattgctggagctgaggcgtccggtagcggttaccgcctggttgaaggaggtgtgtatgcggtccgtacgtgggttgatgagctggggcagggcatctatataggtgctcagcagtttcttcagtccgcggtattccagtatcttcccgatgatgtcgtgcttgctgcggtagctttgcagcacctcttcggaggtgacgtattgtccggtcttggtctttttcgctttctccacgattttcagcttgtcgaacagcacttcgcctacctgcttggcggagctgatattgaatgtctcgccagccatcttgtagatttccttttcaatctcctgcaggcggacagtgaagtgttgggacgactgcttcaatgcttccgtatcgagcagcactccgttgctctctatattgacaagtacggggacgagcggcatctctatttcgtagaacagatgttcggcaccttgctccttcagttccttttccagcacgtttttcagtttgagggtgacgtccgcatcctcgcaggcataacggtagacatcttcgggtggaaggtcgcgcatgttcttttggtttttgcctcgcgctccaatcagctcatcgatgtggatggtttggtagtgcaggtagatttccgccagatagtccatgttgtgtcgcagttcgggttgaagcacgtaatgggcgagcatggtgtcgaaaagcttgcctttcacccggactccgtaattctggaggataatcatatcgtacttgatattttgtcccaccttcatggatttctcgttttcgaagagggggcggaactcgtttacaatttttaaggcttcctctcgttcagcaggtacgggtacgtagtatgcccgattttcggcgtcactgaagctcattcccacgagttcggcatccattggctcggttccggtagtctctgtatctattgagagaatttcgcttgtaagtaacttttgaataatttcctttcttttctcttctgtatcaatgagttgatagtctacatcgagcatttctaaccgcttcagatttgaattttcagaagctcccgtcccctcgcccgcaaaatttgcaaacaaatcgccttgaacgggggcgctgttttcgggattggaggtttgcggctgggcaaacagagtgccggcaaagaggtcgggtgtcggagaggttggggtgggggaggaagagttgccgtttccttttttgagtatccggtcgatgagtgtgcggaattccaactcttcgaaaatcttgcggagttcttcttcgttcggttcttcccggacgagcgaattcatatcgagccggatggggacatctgttttgatggtagcaaggaatttggagaaggtaatcatttcccggtttgtctccaccttcgttttcagtgcgcctttcagttggtcggtgtgttccagcaggttctcgatgctgccgaattcggcaatcagcttctgtgcggttttctcgcccacacccggacagccggggatgttgtcggaagcatcgcccatcagtcccagcatatcgatgacttgctcggtggtttgtatgttgaatttggcttttacttcttcggtacccatcacttcgaatccgccggtgtgcttggggcggtacataaagatgcggtccgataccagctggccgtagtccttgtcgggtgtcatcatataggtggtgatgccctgccgccctgcttcggtggcaagcgtgcctatcacgtcgtccgcttcatagccggccacctcaaggatggggatgcggtaggcgcggatgatatcctttataataggtacggaaaggcggatggtctcgggtgtctcctcgcgctgtgccttgtattgctcgtaggcctcgtggcggaaggtagggcctgacgggtcgaaggctactcctatgtgtgtgggattctcttttttaagcacttcttccagggtgtttacaaagcccagaatggccgaggtgttgaatccttttgagttggttctcgggttcttgatgaacgcgtaataggcccgatatatcagtgcgtaggcatcgagcaaaaacagtttatcgattgaattcatacatttaatcctttttttcatggtaaaagtacaaaaaaataccgtattaaccgttttattactatttttgtaggcaaatagcgatgcatggacaactcatcattgataaaatctccgatttctgaggaactggaggacttcaagaaactttttgaaagtaccctttccagttccaaccttttgctgaacagcgtgattgcgcatatccggcagaagaacgggaagatgatgcgccccattctggtgcttctggctgcgaagcttttcggtaaagtatgtcctgcaaccctgcatgctgcggttgcactggaacttctccataatgcaagccttgtacacgatgatgtagtggatgaaagtactgaacgccgtggacaactctccgttaatgccattttcaataataaggtagccgtgctggcaggcgattatctgcttgcgacagcgttggtgcaagtgggcatgacccgtaatcatgacatcattgacattgtctcctgcctggggcaggatttggcagatggtgaacttctgcagctttccaacgtcagtaatcttcatttttctgaggaagtgtatttcgacatcatccgcaagaagacggccgtgctctttgctgcttgtacgaaggcgggcgcgctctcggtgggagccagcgatgaaatggcggaatctgcgcgtctgttcggtgaatatatcgggctttgttttcagataaaggatgatattttcgattactccgagagcaaggagataggcaaacctaccggaaatgatatggtggaagggaagttgaccctgcccgtgctccatgtactcaataccgtgaaggataaaacagcggaagagattgccgtgaagataaagaacggagaggcaacgcctagtgaaatagcccatttaatcgagtttaccaagcagcatggtggcatagagtatgcttcgcaagtgatgcatgattataagagaaaggccctttctttgctggcttctttgcccgatacggaggtaaaagcagcgcttaccgggtatctggactatgtggtggaacgggaaaaataacggaactatttccggttgataatatgaaaaagcctgatggaatccattccatcaggctttatttataggtaaatgcaacttcctcttaaaagaatttcatttcctcgcccttgatttccgaaagcagcaggttagcaagacggctggttcccaagcggaacagttcgttgttcagccattcttcgccgagcacttccttgacgatggtgtagtaaatcagtgcgtcgttcacgcagttgattcctcctgcgggcttaaagcctaccttgatacccgtcagctcgtgatattccttgatggcctggcacataaccagagcggcctccggtgtggcggcaggctgttgcttgccggtggaagtcttgatgaaatcggcacccgaatacatggaaaggatggatgcttttttgatgttcgaagccgtcttcaaagctccggtttcgaggattaccttcatgtggtgctctttacaggttgctttgagttcttgtatctcctcgcacatgctttcatagtctccagccaggaacttgcccaccgaaataacgatgtctatttcatcggcgccttccatcagtgccatggcagtttctgccactttcacttcaatgaaagtctgggaggaggggaaacctgctgatacacaagctatttttacatcctccacttccagcgtatcttttacgacttctgcaaaattggggtatacacagatggctgccacattcttcaggtcggggaactcttcgtcgaatttattcactttctgggtgaatttcatgacgctttcatcgctgtcttcactcttcagggtggtaaggtcaatgcagttgaacaggaatttctttacctccggtgtattgtttgccggtactttctctgcaatgattctggcaacttgtgcagctatttctgcatcatccagttgggtgttgtactttgccagggcggcgtcatacttactctgggtaggctcattcttctccatggtctttcaatttaggattattgatatgtcttgtctggtcacgtctggttttcttctcgaagttacggcggaaagcctctgtcaggttcactccggtctggtttgcaatacagagaagtacccagagaatatctgccatttcatcgtcgaggttgtctttttctccttctttgaaggactggtctccgtacttgcgggccatgacgcgggccatttcgcccacttcttcggtcagtatggccatgttggtgagttcgctgaaatagcgtactccgtattcctttatccaggaatccacttgtttctgtgcttcttctaacgtcattattccttgttttttgtatccatacagatggttacgggaccatcgttcatcagttctactttcatatcggcgccaaattcgccggtacctatttctttacctaatgctaaactcatttcccggcagaattgttcgtacagcgggacggatatttccggtcgtgctgcccgtatgtaggaagggcggttgcctttcttggtggaggcatgtagggtgaactggctgataaccagtatttcgccgcctgcctcaagaatggatttgttcatcacgccgttttcgtcgtcgaaaatgcgcaggttgactatcttcttgcaaagccagtcaatatcttcttttccatcggattcttcgatgcctacgagtatcatgaggccttttccaatggaggctttgcaggttccgttgatggtgacggaagcgtatccggcacgttgtatcactactctcatgttattcttgtctttttgagggaacaaagttacgaattaattcgttgtgtgcatggctttgcaggctgatttatcagtcattatttctctgagaaataggtctggatgattttggctttcgcttctcccaccacggtggcaagctcctcggcagatgcttcgcggatacgcttcacgcttttgaactccttgagcaacgcacttttcgtcttttcaccgatgccttttatctcgtccagtgcggaggcaatctgccgtttgctgcgcttgtcgcggtggaaggtaatggcgaagcggtgcacttcatcttgaatctgcgtcagcaatcggaagaggggggtgttctgtttcaatccgatggtctggggagggaaaccgtacagcagttcggaagtgcggtgtttgccatccttggcaagcccggcgatggggatgttcaggccaagttcgtctatcacctcttttacggcgctcatttgccctttcccaccgtcggtgataagaagatcgggcaagggcgttttctcttccatggcgcgctgatagcgccgttttacgacttctttcatggaggcatagtcatccggtccctctacggtcttgatattgtacttgcggtaatccttcttggaaggtttccccttgacgaagactacgcacccggccacggggtcggaaccttggatgttggagttatcgaaacattctatctgcatgggcaggcgatccaggtgcagctcttgttgtatctctttcagcaggcgcacagtccgttgctccggattcagcttttcggcttgtttcaggcggtcggctttgtactgcttcacgttgaggatggagagttccagcagcttctttttgtctccccgttgcgggatggtgaaaacgatatctttcagcttcatatctagctcaaaaggtacgatgatttcacgtgaaaggcttttgtatctttcccgcatttcgatgatgccgagggagagcagctcttccttggtttcgttcagccgctttttgtactcgaaggtgaaagcctggttgatggcgccgttcgtaatgtgtaggtagttgacgaaagcggacttttcatcgctgtcttcttcaatggagaatacgtcgatgttgtgcagcacgttgcttaccacttccgattttgcccggtagttttccagcagcaggtatttttcctttatcttctgtgcttcttcaaacttcatttcggctgccaactcctgcatttgttggaagagcatcctttctatctcttgggtattccctttgaggatttccttgatttcagcgatgttttttaggtaatcttcctgactttgcttgccgatgcaaggccctgcacagttcttgatgtgatattccaggcaaacattgaactttccggcacgtatgttctctggagagaggttcaggtggcatgtacgtaaggggtacagatgcttgatgaggtcgagtaatgcgtacatggaaggtatatggctgtaagggccataataggaggaaccgttacggattatcttccgggttctgaatacgcgtggaaagtattcgttctgcacgcagatgctaggatatgttttgtcgtctttcaacagtacgttgtagcgtggcttgtatttcttgataagattgttttccaacaatagcgcgtcttcttccgtattcaccacgatatatcggatatctgcaatcttgctgaccagcactttcgtctttctcggttcgtgctcccggttgaagtaggaagacactcttcgcttcagattctttgcctttcctacatatataatggtcccttcggtattcagatattggtaaataccaggactttcgggaaggttggatacaatccctttgaggtagtcgttagttctgagttcttccataatggtatgatgaaaaggtggaggataagaggagtaaaatgatggataacatcaactctcaggtaagagtactctgtgcctctgtgtcgtttcgtttgacaaatttatagcgatagcaccgattccacttctacatcatccccaaacacatccttgccatgaagctctttcagctcgatgatgaagtttacatacactttcttggggctcatctgcttcaccaatttgcaggcagcttccattgttccaccggttgccagtaagtcgtcgtgcagcaaaactacatcgtcttcattaatggcatccttgtgcatctgtacggtatctttgccatattctttatcatagctttcttcaatggtttctgcaggaagttttcccggcttgcggatagggacgaagcctgctcccagtctggtggcgagaatggggcccataatgaaacctcttgattctatacccactactttggttattcctttgtccttatacatctcgtacagtgtgtccgagagctcctgcaaggcggcaggttccttgaacaaggtagttacatcgtagaatagaattcccggaatggggaagttgggaatttcccgaatgcttttagcaagcgtttctttgctcataatcagtttatttaataggtttgttgaattctttgtttcacgtggaactttgcgctctatcgtccgcaaagtaccagtagtacgttgatgtcgctcggagatactcccggaatccgactcgcttgggctattgtttccggatctatctttaccagcttctgtctggcttcggtggaaagggattggatggaattatagtcaaactttccttttatcttgatgctttccaatcttgccaacttatccgcaataatccgttcgcgtccgatgtatccttcgtatttgatgagtatttctgcagcttctacaatttcttcttttctatcggatattttatccagttctcgtttaaaggcgctgacatgttcggcaatgttctcaattgttacttgcggtcggtttatcaaatctatcaatttgcatccttggcgcagtggagtagtgccgagctgctccaataccggattgattaatgccggtttcatcgagtaattccgcgtgaagtctataatccggttcacggcttcacgtttttctgtcagcagcttgtaccgctcttccttggcgagtcctagcttccaggctttttccgtgagtcgcatgtccgcatcatccatacggagcaggatgcgatattcggcacgggaagtaaacatacggtaaggctcgtccacaccttttgttaccaagtcatcgattaaaacgccgatatatgcttcatctcttgcaagggtgaatggttctccgccgtggcaattgatgtgggcgttgatgcctgccatgattccttgtccggcagcttcctcgtaaccggttgttccgtttacttgtccggcaaagaacagattctttatattcttcgtttccagcgtatgtttcagttgggtggggtcaaagaagtcgtattcgatggcatagcccgggcggtagatgaccaaatctctgaatgccggtatctttttcaatgctgtaatctggatgttcatgggcaatgaagaagagaatccattcaagtagagctcctgggttgtttccccttcgggctccaggaaaagctggtgctgcggcttgtcggggaaagttacaatcttggtctctatactggggcaataacgtgggccaatactttggatttgtccgttgaaaaggggagaatctggcagaccttcctgcagaatccggtgtacctcttcattggtgaaacaagtccagcaagggagctgtttcaaatggcgtacatgagtatccatgaacgagaacttgtggaagtcacattctccgtcttgaatttccatatcctcataatgcacgctgcgtccgtctatgcgtacgggggttcccgtcttcatgcgtccgaatgtgatgccatgtttggcgatggactcggttaattggtaggatgcaggttctgccatacgtccacccggaagcatggtacgtcccacgtgcatcagtccgttgaggaaagttcctgcggtgagtactacacatttggcatggaacgttactccccatagtgttactactcctgtaatctcaccgttttcaacgaggatttcctgcacggtatcttgccagatatgcaggttggggatattttccaggatttctctccatgcccagatgaatttgttgcgatcgcactgtgcgcgtgggctccacatagcgggacctttggaacggttcagtatacggaactgtatggctgtctggtctgtcaccaatcccatatatcctcccaaggcgtctatttcgcgtactatctgtcctttggcgatgcctcccactgccgggttacaactcatctgtccgattttgttcatatccattgtgataagacaagtcttcgagcccaggtttgcggcagcggcagcggcctcgcatcctgcgtgtccggcacctattacaataatgtcatacttaaactccattcgttcagtgtattttaaaactgtgcaaagttacgaaaaaagttgtatgccgggacgtgtcatatcttaaaatccggatatatcttctttggcattgcttatatttccgcatccggtatcatacttattttctggatttctttaactggagacatattgcttgtatttggtctgtaatgtaatcaaaataaaactttttagtgtgattacttttctttttgaaaaagagacatatctttgcagtgattgaatattaaaaagcgttttgattgattaattttaaggaagagaagcatgagaaagaaattcttcttgttaatcattgtctgtctggttatgggggcagtgaccgatatcgaaggtaactttacaatcttgaatgtactgagtacggtatttctgtcagcaggttggcaaaactgtcagaaagatgcctttgatggattcctttgataaaatgagacgataataccttgatatttcacaaaaatactatttattggctcgaaatttctattctttttttctgaatcggcttatctttgctttcgtagaaatcaataaaaagttataatactatgagaagacttttcctcatatcgtcattcttgacgttgtttgcaatcggaagctcggcgcaatggaagccggcaggtgataaaatcaaaacggactgggcatcccagattaatcccgcgaatgtgttgcccgaatatcctcgtcccatcatggaacggagtgactggaagaacttgaacggactgtggaattatgccgttataaataaaggtgagcatcttccggcagagttcgaagggcagatacttgttccctttgctattgaatcctccttgtccggagttggaaaaagaatcaatgaaaaccaggaactggtctaccagcgcagttttgaaattccttctgcctggaagggaaaacaagtgctgttgcactttggtgctgtcgactggaaaacggatgtatgggtgaatgatgtgaaagtaggcagccatacggggggatttactccgttctccttcgatattactgccgccctttctggcaaaggcaacaatcagttggtcgtaaaggtttgggacccaacggataaaggacctcaaccccgtggaaagcaggtcagcaatccggaaggtatctggtacactcccgtaagcggtatctggcagacggtatggatggagccggttgccggaaaacatatcgagaatctccgtatcactcccgatattgaccgtaatctgttgacagtgagggctgaattgaatagtgcatgcccttctgactttgtggaagtgaatgtgtatgacggcaatcaactggtagctaccggcaaaagtatcaatgcagagccggtggaggtgtccatgccccggaatgccaagttgtggagtccggattcccccttcctttatacgctgaaagtgacgctgaaaagcggaggaaaggtagtggataaggtggacagctatgctgccatgcgtaagtactccacccgtcgtgacgcggatggtatcgtacgtctggaactgaataacgaagctttgttccagtttggaccgctggaccagggctggtggcccgacggactgtatacagctcccacagacgaggctttgctgtacgatgtacagaagacgaaagatttcggtttcaatatgattcgcaagcatatcaaggtggaaccggcacgttggtacacacattgtgaccgtttgggtatcatcgtatggcaggatatgccgagcggtgaccgtaatccggaatggcagaaccgtcgctatttcgacgggacagaaatgaaacgttctgccgaatccgaagcttattatcgaaaggaatggaaagaaataatggattgcctctactcttatccgtgtatcggtacatgggtaccgttcaacgaagcttgggggcagttcaagacggtagagatagccgaatggacgaaacagtatgacccgacccgcctggtgaatccggcaagcggcggtaaccattatacttgcggtgacatgctcgaccttcacaactatccccaaccggaaatgtatctgtatgatgcacagcgcgctacggttttgggtgagtatggcggcattggccttgtcttgaaagaccatctttgggaaccgaatcgcaactggggatatgttcagtttaactcttccaaagaagtgactgatgagtacgtgaaatatgccgatatgctgtatcggatgataaaaagaggtttctcggcggccgtctatacacagaccacggatgtggaggtggaagtgaacggtctgatgacttacgaccgcaaggtgataaagctggatgagaaacgcgtgaaggagataaatacgcgtatctgcaattcacttaagaaataagggcatttataatttaccatttacaaagtacaatttggctgcgctgttatctgcatagttaaattgtactttgtaaatggtaaattgtacataaaaatgttgttatgaaacgattgattataaagcttttccttagtctgtgcctatgggcggtattgccggtctgtgcacaggatgctgttcattactatttcagaacgatggatatccggaacggtctttcgcagaacaccgtgtatcagattttgcaggataggaaaggctttatgtggttcggaaccaaggacggtctgaaccgttatgacggattgtctttccgtgtctacaagaaggagaattccagtttaggcaggaatttcataaccgcactctatgaagaccgccggggtaatatctggattggaaccgatggaggagtctttatttacgaccccgtgttggattcctttaccgctttcgatgaggccagtgataacggcagtatcatcagggatttcgtcactatgattggaagtgacgaggacgataatatctggatatcggtagaaaaccaggggttgttctgttataaaccggatgaagggagcctgctgaactatctgcacgattcgggactgcccaatgtcacccgcttttggctgaatgggaatacgtgttggctggctttgtatgcggataatctttactatgcgaaagctgactttgaaactcctctgcagcctttcaaggatgcggaaggaaatgaaattttcaaaaatgatattattaactggcaggtcaacggaccccataactgcgtatatatcgcttcgctgaacggtttgacagagataaatcagactacaggcaagacgcggaagctgctgaacacctatgtgagggccttgcagttcaaatctgacaacgagctgtgggtgggtgcagagtctggtttgtatatttacaatctgacgaatgacaagattacccatctgaccgttcccgaccaggatgattcgtatgcattgtcggacaaagccatttattcgctctgctgtgacaaggagaacggcatgtggataggttcctatttcggtggagtgaactattatccttatcagtggacttatttcgagaagttctatccgagagacaatctcaggcattttggccgtcgtgtacgggaaatctgtgaaagtaatgacggcactttgtggataggtaccgaagacaaaggcttgttcaattacaatccggaaaacggaaagatagtgccctttgaacatccggccatttatcagaatgttcatggcctttgtctggatggggatgatttgtgggtaggtacgttttccggtggtctgaaccgggtgaatcttcggaccaggcgggtgaaacattatgccaagggtgagagtgagaattccatggtcgccaatgacgcctttaccatttgcaggaccactacgggagacgtgtggataggcaccacgtccggtctgttgaagtataatcgtcccacggatgactttacccggattcctcagctgaagaatatgtttacttatgacattctggaggacttcaacggaaatttgtggtttgccactttctccaatggagtgttctgctacaatgtaagaagccggcagtggaggaattatctgcctaatgagaacgattcgacctctcttccctacaataaagtaatcagtatttacgaggacagcaagaagcgtctgtggttcatgacgctgggtgagggcttctgccgctacaatccggaaacggataattttacccgttatgacatgtcgaaaggatttccgagcaataccatttacaagatggtcgaggataagcggggaaacttatggattacttctaattatggtctggtctgcttcaatcccgatacggagagcaagcatgtttataccacggctaatgggttgctgagcaaccagtttaatttccagtccggttacattgacaagaaaggacgcatctatttaggaagtatcaacggattcattgcctttgatccggaaacttttgtggagaatactttcctccctcccgtggtgattacagacttctttctgttcaataaacggctttcggtggatagtccggattctcctttagagaagagcattacctatgcggatgaaatagaactggatgccgaccaaaactccttctctttccaggttgcggctttaagttatcaagcacccgaaatgaatggacttgaatataagttggaaggttttgaccgcgactggtatacggtagggcggaattccatcatcaactattcaaaccttccttatggaagctatacattgcgtataaaaggttccaacagcgatggcaagtggaatgctacggaacgtgtgctcgacatccatattcatcctcctttctatctctccacctgggcatatgccggttatacgatattggcgttatgctcactggctgctgtaatcatctatttcagaaaacggacccggcagaagcatcagcaggctatggacaagtttgagcgggaaaaggaacgtgagttgtatactgcaaagatagacttctttacaaatgtggcgcatgagatacgtacaccacttacactgataaagagcccgcttgagaatgtactggcttcccaatctgtttcggatgacatcagggatgatttggagaccatggaactgaacaccaaccgactgctcgatttggtaaaccagttgctggacttccggaagacagagacacaaggcttccgattgaattttgtggaatgtgacgtatctgagctcttacagaagacgtataagcgtttcaagcctttagcacgtgaaagggggctggcattgagtatagagactcccgaaagcttgtatgcttcggttgatagggaagggcttaccaagattatcagcaatctgctgaccaatgcgataaagtattcggagacctatatacgcatcaggttatattcggaaggtgaaagactgctgctttctgtatgcaatgacggccttgtcattccggtagagatgcgcgaggagattttcaagccgttcatccagtataaaaccggtacgttgcgctctgtgcccggcaccggtatcgggcttgcgcttgcccgttcattggccgaactccatgagggtacgttgtgcatggaagattcgatggagaacaactgtttcctgctgtcacttccactaaggcacgagcagacggtggtcgtagagcataaagaaccggtaatggtcggggaatcctccgaggaaagtggtgcaggtactgccttggaacagcaccggtatacccttttggtggtggaagacagtccggaaatgcaggcatttattgtgaaacagctctcttcggaatatcgtgtgctgactaccgtgaacggagtggaggctttgaaagtgctgaaagagcatactgtaaatcttgtcatttcagacataatgatgcccgagatggatggattagaattgtgcgaacacctgaagtccaagcttgactatagccatataccgattattctgcttacagcgaagacgacccttcaagccaaaatagagggaatgaaattgggggctgacgtatatatagagaaacctttctctgtggaatatctgaaagtgtgtgtagccaatctgctgaacaatcgtgagaagctacgggcttctttagtcaattctccttttgtgcagacgggcagtatggcaatgacaaaggcagatgaatctttccttaaaacattgaaggaagtggtggttgccaatatgcagaatccggatttctgtctggatgatatggcaagcctgctgaacatgagccgttcgagcctgaatcggaagataaagggcatattggatatgactcccaatgactacatccgcttggaacgactgaagaaagcggcgcagcttttgaaggaaggggagtgtaaaatcaatgaggtttgctacatgaccggcttcaatactccttcctattttaccaagtgctttcagaagcaattcggtattttgcccaaagacttcgtgaaatgattgaatttatgttagtataatgaccaattacgaaagtgcatacagaaagagggtagatggttggggggatacattcttaatgcggagttattgattggaagtatgctccatttatctaatctatagctatttgtaaacttgttcgaaaatttttgtttatgtataaaaggtattctttctcttttccccatttgtatctgtacttatttggtgaatgattacccatggttaaaatagaaaaatggacttaaatgctctttgaaatgtattcagaggtgttttttgaatttatcattatatagattgaagcgatatttgtattaaatttacttttgtactaatatatttgcatccagaaaccaattaattgttaatactatgaaatgaatatttttatctatttgacaaatgctttacacatttgtgggatgtcaatttttgtgttttattcgaaaatctaattctattaaaaattattttatgtgctgtattaatcaaaaaaacaagttgaaagtaaatagacgagtgatttttctatttatgttggtatttatttgcttttcattatttgcacaaagtgagaagatggtggtgcaagggtatgtgacagatgccgcaagggatccattgcctggtgttacaattactgtaaaaggtacttctgatggggtgattactaatgttgacggagaatattctattactgtatcaaagaatgctattctcatttttagctatgtgggatttgtcgatcaggaaatccctattgctggtagtaagattcttaatgtaactatggaagaagaaattggtaaactggacgaagtcgtaattgttggatatggtacacaaaaaaaagtaagtgtaactggttctgtatctaatatatcaacgaaagaattggccaaaatttcgacaccttcacttagtaacactttaggaggacagattcctggtatcgtgacacgtcaagcaataggtgagcccgggtatgatcaggcccaaatttatattcgtggttttggtacttggacaaatagaaatcctttggttttggttgatggaattgagcgagatatgaatacgattaatactgaagaagtagaaagcatttcggttttaaaagatgcatcggcaacagctgtttatggagttcgtggagctaatggtgtaattttgattacaactaaaaaaggtaatataggaaaacctaaaataacatttagaactgaatatgcagtgttaactggacttaggtatcctgattacatcaatgctgcagaatatgcagaattggttaatgaagggcgtaggaatgtaggtattacaagtatggcctacacagatgagcaaattgaattatatcgtaacgggagtgacccttatttgcatcctaacgtagattgggtagatgaaatattgcgtaaaaatacgacccaaagtattacgaatttgaatattacaggtggtagtgaagttgtgagatattttgtgaatgttgggtatacatctcaaagtggtttatataaagaagataacttaaataattacaatacaaatagtaaaattaatcgctacaattttcgttctcgcgtagatgtaaacctttcaaaagatttgtctgttgagttaggagtcggaggtatcattcaaagccgtaatttcccgggtaaaagccaaggtgatatctttacagcattgagaagaacacctcctttggcttttccaaaacagaatccggatggttctcctggaggtatttctgcatttttgggtagtaatccgtggggtatggtgacacaaagtggatatgaatctcaaaattggaatacattgcaaggaactttttcagcacattgggatttatcttctctgataacgaagggattatcactgaatgggcgttttgcatatgaccattattatattaataataaacaatactataaggactttgaagtgaaacattatgacgggaaagatgcggaagggaatgatttgtatacggttttgcgagaagaaaatatcaaaaatgtgggattgcatgaaagtgcgaatagagctatatattatgaagtcgctttgaattatgatcgcacttttgataaacataatgttgcaggaatgtttctatttaatagacgtgattatgttgatttaagaaatacagaccctactggctctctaccatatagacgtcagggcatagcagggcgtgttagttataattggaatcagagatattttgcagaatttaattttggttataatggttcggagcaattccccaaaggaaaaagatatggttttttcccttctatttcattgggctatgtaattacgaatgaagatttctggaatccggaatgggctgtcagtaacttgaagataagaggtagctatggtgaggtaggtaatgatatatcgaatagtgctcgttttttgtatctgacaactatgaatatgcatagtgcaaccattccgttcggtaaggatggcaacacatatttggaaggtcttagtgaaggaaagattggtaatcctaatgttacgtgggaaacggctaagaaactaaatgttggctttgatttgggtttgtttaaagatgctttgtcattgcaggttgatatttttagtgagaaacgcgatggcattttgattaatcgtggaactatacctagtgtaggagggttccccgatggtgctatacctgtggctaatttagggaaagctgagaataaaggtattgaagctgcgttggaattcaaaaaaacgactcacaatgggttgttctattctttgagaggtaatttctcgtttgcacgtaataaaattatagaaaatgatgaaccggagcccctatataaatatcaggatgctcgcggacgttgcattgatcagccttttggcttggttgctttaggtttctttaaagatcaagatgatataaagaatagtcctcggcaaacattccaaagcgaggtacgtcctggagatatcaagtacatggatgtgaatgatgatggtgtgatagataattatgacaaggtggctattggttacccccgaacacctgaaataatgatgggatttggtggaactgtggcatataaggggtttgatgttagtgtgttctttactggggcagctcatacaagtttcttcttggatgggccgacgatgtatcctttctataatggagaaggttcttggaatgtattgcgtgaatattacgatcataggtggactcccgaaacagctgttacagctaaatatccgttggttacaaatgaatttagtaataacaattatagaacttctactttatggatgaaaaatggttcttatttaaagttgaagacggctgaaataggatatacattcaaaggacatttaattgataagatgttcatggatgatatccgtatattttgtaatgggcagaacttattatctttcgaccatttaaaaatagtagatccggaagcagataatggaactggtagttatcccatgcagagaagtataaatgtaggtttccaaattaattttaaataatgagatttatgaaaaaacaaatgattgataataagatattgaagttctgttttttgatgcttgcggttgtaatgtcgtcatgtagtgattatttagataagactcctgatgatgcttcatcaaagacaatggaggatatttttagtaaccagctatatacagaacgctttcttttgaagacatatagttatcttcctccggaaaataattacaatgataattttgcacattctccgtggagtggtgcttctgatgagatgaatttaacttggacatatcccatgtgtaagaaaatgaattcgggatcgtgggatgcttcaatgattgaagaaaattgtaatatctggacagaattatatcgaggaatacgccaatgcaatttgtttttggagaatgtcgttaattcgccagtagatgaagctacaaaaaatatgtggattggggaggtgcattttctacgtggactatttcatttctttttgttgcgaaattatgggcctattccaattatagaccattctttgaaaatggatgaaaagtactattatgttcggaatacatttgatcaatgtatagacttcatcgtgacagaatttcaacaatgcattgatagtaatgttccgatagcttatacaaatacttccggttctatagtgacatcaaaatatgggcgtgtgactaaagcggcagctttagctatgaaatctagagttttactctatgctgcaagtccgctattcaatgggaatgctgattatgtgaattataaaaatgaagatgggactttattatttggagcgaaggatgatggaaaatggcagttagcagcaaatgctgcattggagtgcattactcaggtggagcagagtggtcattataaattgtatcattctaaaacagatgatccttataataactatgctgagattttcttacctgggaataaatggaatgaagaaattttgtttgctcgcaataagggaacatcgtttggtaataatattcaccaggaacaatgtatgtcacctaatggaatgggaggatggtctggactaagtccgacgcaagaaatggttgatgcttatgagatgagtgatggcacaactccgattgttgggtacaatatagatggaagccctataataaatagtgaaagtaaatattgtgaggagggagtagctgaagttgctggtaaatatcatcctgcaggcatttcgaatatgtatgctaatagagagcctcgtttctatgctacgatcaattttaatgggcaacaatggcgaggaagaactttggagttcttttatggaggtaaagatggtatgcaaaatagtagtgttgattactcttcaactggatatttgttgagaaagacatcagatgaggaggtgaatattgttgccggtactggaggacagattgagattgcgatatatgctagattggctgagatatatttgaattatgcggaagctttgaatgaagcgaaaggacctattgatgaagtatataaatatgtaaatttgattagaaatcgttctggtcttcctaatttgaggataggattaagtaaagaagagatgagagaacggattcatcatgagcgtagaatagagttggcttttgaagcggggcatcgttatttcgattgtcatcgttggaaaatagcagaaattgttgataatggagatattcatggaatgaatataaatgctggcttagagcattattttgaacgtactagaattagtaaacgtatttttgagaaaaagcattatttgtttcctgttcctcaggctgaaattaataaacgtataggtgtggtgcaatccccgttgtggtagttcttatgaatattgatgaagtaatagcttgtgaagaagctattacttcgtttccttttaatttaatggcttatgagtatattaaaatatatatttgctccgttatcttggaaacggacaaactatcaacattaaagtctaattttaaaatattttaagcatgaaacgaacggctatattattttatacgctgctccctctgttattgctgattggcagtggacaagccttggcacgcaagcaatggacggaaaaacaagcttggaaatggcaagaagaagtgggcgttatcaagggcttcaatgaacccaatccggcctaccccagcatgacgcgggtcgatgtgttgtgcaaagcccatgaagtgggtttgaacagcgtgcgcttttgggtgcgcgggcggacttctgatgaccaaatccggtacattcaacagatgatagacgatgccgaccaattcggcatgaccgtctcgcccgtcatctcatgcgtggctgacaactattggcgcaaccggggcaaacagcccatgcaggaatatgaagcgaccgtccggaaagtcatccgggctttcgccaaggagaaacgcattgtgttttgggatttgtggaacgaaccccgctatgaagacaaggcggaaacctacgaacagatggatatactcgaacagatggtgcagtggtgtcgcgacgaaaatccgatccagccacttacgtcctccatcatctgggctactatcaaacgaaacagcaagtcgctcaaacgcatggcggaagtggaaagcatgatggacatacacaacttccactactacaactgtgcgctcaacttcagcaaaaatattaatgacatgatggactatctgcaagaaataggctctcgtcccatggtagcgactgagtgcctcacccgcacgaacggctctggcatagcccgtacattcgccgcattttcaaaatacaaagtcaatttctacatttggggattgtatatcaacgactgcaactgggaagcccgctggggacggagcacttacgacccctacggtccgatgttccacaatatcctctatagtgacggaacggcctatgacagccgggagatagcgatgatcaaaaactaccgcttcgcttctccaggagaagaactctatcccggactggaaatcaccgaacgctggaatcacaaaagagcctggcaatggatggcaactggtccgttgaagggacgtgccgcacaaaccctctatttgggcacaacgcagctcccgggctacaatgccgtcagcctgaaactgtcataccgtgattgggtgaccgactctaccgcgtttttcaacaatttggaagagcaattgagtcttgccgcaacgaaccggctcacagtcatgccggtattgctcactgacgatgatttcaatgctccgcacctttccttggcagaatatgtcggcacggtcatcggcaaatactattgtgacacccgtatcaaagcgtgggaattgtaccaccatcccggcgagaaagtgaccgccgcgtccgcgctccgcgaactgatcacgctcatcttccgccacgcccgcaaccagtatgccaatcagccgcttaccatgacaccttatgtacaagtgaagccgtttgctcccgattttaactattggggagctttggtacatgggcatagagccggttgggactacctgacttacggaggaggaagctctgccgaactctgttaccaaatatggagtctgtctgacattatcgctttttcctctgctcaaaaagcaccggaaaccggctggctggccagtatctgctatcgtttcggacggccgattttctgtacggagtggaacgctcccgcggtggaagacatcgttcctaccttggaacgctttgctatcagccaactgcattggttttccggtcaagagatttcctctgaactgctggataatttcgcgttcaagcagatttctacccaacggcaagtcacggaggggatattttaaatgtcagattgatttctgcgataccttattcaatatcaaggaatacagcagggtgcagttctgcgttatggtgctgagctgtagcgtttatgaaaactacgtggccaaaacaattgctaagatgtattagggagcgatacccctatgggattattacatatggaggatacagctggaagtaaatggtaagatgttgaatatcagtaatgaacatgctctgtgcatatctcgttatatgacatctacggataaacttgtctgggatgtctctaaaggagagtggggcgtgctgcgtacgggaatgatgccgaccggacgaaccaatttcccgggtggcccggatggcactggccttgagatagacaagatgagcaaggggcatcttgccatgcattttgatacgtttatcggacaaattttaacgcgtattcccgcacaagaccgccggatattcaaggtgtggttcagaatgccttactcgaactaagcgactatgtttggggatattgttatactcaactgactgatgtagagcaagaacagaatggtctttattattatgaccgtacatctaaattcgatatgaaacgtattcatgttatttttagcaagttacctaagaaaatgaaatgatgtccaaactatattatactatgtctgattataaaaaactactattaccatttgcctttgcttgctgcagcactttgttcgcgcagaacgtccagaatccggtacttccgggagtagccgatgccggtgcgatgaagtataatggcaagtactacatcggcggagtttttacgaatggggacttttatgtatccgatgacttggttcattggggtaagcctatccatgtggtagatatggataacgattggagcaggggcagtggagcaggcaatgaccaaatccatgccaacgatatgctctacctgaacggtgacttccatctgtattggtctgtcaattactggagaagagacaagcatgccgttcacattgtacacgcacaaagtaaagatgtcctggggccttatgcagaacccgacaagaagacatggatggataaccgcatcgaccctatgatattcagagatgatgatggacaactatacatgtatatggtacgttttactgatggaaataccatatggggacgtaaaatgaagaacccggcagaatttgccggcgaaccggtgtgccagttcgcctcattgccagatacatgggaaacgatggataacagagtagcggagggaccgtgggtcatgaagtatagagaccgctactatatgatgtataatgccaaccatacctctacagagtggggcaattatcagttgggagttgctgaggcagactttcctttaggttttcaaaatggtaataaatatagctatccggttgtaggttgcaatcagacacaactggaggagaagcaagtggatttattgcggtatggccgcacgtatgagccgttgtttgcttatacggagagcaagccggagggcgactggacaaaagcgacctacgatgactccggctgggcgaggggggagaccggcttttcgtcccgtgaagtgaaaggttccacaacccggcatctgggtacttggtggaatacgccctccctatggttgcgaaagactttctctgccggtagcgaaaccggcaatctggcactgcgtgtcgctcacgatggagatacccggatttatctgaacggaacaattgtctacgagaagcaggggcgtgattattgcatcgtaaacctggacaagaagctgcgtgctgctttgaaggaaggcacgaatctgcttgccgtagaaacaaacaagggacgttcgcaattcttcgacgtttctctgttcgatatgaaagacggcattgccgatgatattctgatgactcccggtcagcccaatattttgagaggtcccaacggatttgaatggtggctgatttatatggcaaacaagaacgatgagcatcggggacaatatatcaaccgtgtccagttcttcgacaagactttgtttgtggacggtatcactggtccacgtacggcgggttatcatcccgaaccttcgatgcccacgtttgcggataaaggcgaaactgcttcgttcggtgtgctgaagcaagtacagccgtccgtggcttacttgttcgagacaggagtcaagaccgagggtggagccggtgtcattgcttggtggaaggatgcagataactgtgcctatgtaggtttggatgccgagaaccggagctggtacctgcgtacacttgtcggcggtaaagaaaataaggaatcttatgccctgccggaagatttccgttggggggtgtatcatcatctgcgcattgagcgtaatggtggctgtctgaagatttggctggatgagattcccgcaccgggaaaacatgtctttgcagaggctgttccggcagaagaagcgggtgttcccggagtatttgatgagacaaagtctgctttgttcgaagggactacctataccatcggtttcgatgatgtgcattttcagctttcggagaatgaggagttgttgaaaggcgatttcctgaacgattatgaattcagcttccagttatccggcttgtccggacaagacaaggcaggaagctatccggtttatgtggataaggataactatgtgaaggctcagtttaatggtgctacccgtatgcttgaggtgacagctgtgaagaaggggaaaaacgcttggaaaaaggagttttcactaggatgcctgcaaacattctatccggatgtgaagtataccgacttcattgagaaagattatcgttttgctgcacctacgtggctggataccctttacctgaaccgtcatgaagcaggtaacaagtccgaatttgtagatgacatgttcggcaaattcgacatagagtacctgaatggcagcgaatggtatccgatagagagcaaaagtgggggagtagcagaacatcctgcgtataattattgtacctttactccggtgaaggcagaaggtatccggttcattaacaaggaggcggaagatttggaacgccatatctataagataggcgtacacgagttgtggaaagactcctataattttcgtgcagtacgccgggcggacaaactgtatctgtttgtggacggcagggaattgggtacgttagacatccgctaccctgcgtcccgcatcggattctgttcggagggcgaatctcctgcctataagggagtgctgtattatcacatagggcaggttcccaatcagatgaagccttgattggatgttggaaccgcattttgtcttgaaatttgcacatcgaatgataaaactgtaatatgttggtaatcagtctgcttaaattactcttatctaagtatacgactgagggaacctaagtatatgactgagacctcttcactatacgaggagatgacgaaatgagtttgatgtaaatatttattttgaaatagaaaccatgagaatcatgaaaaagaattttatatgtatgtatttgtttctgtcggctacgctggcttcctgtcagtcctgctcttcagactataaggatgtggacgatattgttgtcgaaggagttgaaacaccggtacctttgggcgacccgttcatcatgttgtacgagggtacttactatgcatacggcacccatgcggatgacggcattgaagtctatacctccgatgatttgcagacttggaagtataagggcatggcgctccaaaagaaggatgtctgggccgaccgttggttctgggcgccggaggtctacgaagtgaacgggaagttctatatgtactattcggcagacgagcatatctgtgtggcaacagccgattcgcccgcaggtccgttcactcagagcaagaaggagccccagattgccgatgagaaatgcattgataactccctgttcattgatgacgacggcacaccttatctctttttcgaccgtttcaacgacggactcaacatttgggtggccgaattggagaaagacctcatgactatcaagaaggagaccatgcatccttgcattcacgtttctcaggcatgggaggaagtgtggcctcgtgtgaatgaaggtccgtttgtcgtcaagcacaacggaatttattatatgacttattccgccaacagttatgaaagtcccttctacggcataggttgcgccacggctaccgatttgatgggtacttggaccaaatacgaggagaatcccttgttgcagaaacccggagaactggtcggggtgggacacagtgccaccttcacagacaaggctggcaagcttcgtcttgttttccatgctcataaggacaagaacaatatccatccgcgcgccatgtatatcactgatgtttctttcgagaaagtggacggtgtggaccgtatgagaatcagcaaggactatatgacccccaaagtagtaaaataaaagatggatatggagaaaaattgtatatggttgctgttgctttgtctttgttttgccggatgcaaggagaagacggttgtagaatcagactatctgccgattgccgacccttacgtgatgctttacgaaggcaagtactatgcttacggcaccggaggtacggtagaaggggagggctttgcctgcttctcttccgatgacctgaagaactggacgcgtgaaggccaggcgttgtcggccgccgactcctacggtacgtggggattctgggctccggaagtctactatatcgagtcgaagaaaaagttttacttgttctactccaccgaagagcatatttgcgtggcaacggcagatactccccaaggcccgttccgtcaggaggtgaagcagcctatatgggatgagaagagcattgatacttctctcttcatcgacgatgacggcacgccttacctttatttcgtgcgtttcacagatggcaatgtcatttgggtggcagaaatgaacgatgatttgaccggcatcaagcaggaaacgttgacggagtgcattaaagtgggagagccttgggaactttcgcaggacaagcctgccaaggtggccgaaggcccttccgtcttgaagaaagagggcatttattacctgatttattcagccaatcactttgaaagcaaaaattacggagtgggctacgcaacttcagacagtcctatgggaccgtggaagaaatacgagggaaacccgattctgcaacgtgccgatggtttgatgggtaccggacacggagcgcccttccgttgcaaagacggcagttggaaatatattttccatgcacactgggattccacgaaggtacagccgcgtacttcgtacatcaaggattttgccatttccgaccagagaacggtttctatcggtggccctcttatccgtccgcaggtattaactgataatctgacatcaaaatgaaaaaaggactgttttattatatgctgatagcatgcctctgtgcttgtcaaaagaagacagaaacaatctctactgcttctttattgaaagaaatggtggattgtgaagcattggcaaagtatcctgaaccttattatgaaaccaggcagttcagtagttacgaccgggcgtctgtcaaaaaagatagtgtctcttggtatgccaattgtgaccgaagccagtttctgcgcgttgattccattgacggacggagagagtttgttctggttgatacggacggtccgggagctatcactcgcttttgggtgactgtagccgcatattcggataaaggaaccctgcgtttttatcttgataatcaggaggttcccgaaataggaggggaggttctgggcatattgagcggacatgctctggtagatgcgcctctttcggcttctgtatcggaactgacggactataagcagaggggacataatctgtatctgcccataccttatgccaagcattgcaagattacctatgaaagtccttccatcaaggaacccggcgagttttccgaagaatgcttctattacaacatcaattaccgtacttatgcagaaggaacgtctgtagccactttctctaaggaggacatcaagcagaatgcgaaattactggcagatgtacaacgaaaactgactgtatcccggagggaaataggaggattgcagaaagaaccgatgcttcggagtgtgctggctgccggtgaagagcgggatatgaccctttccggtccgggtgctgttcggcgtctggacgtaaagctgcatgccggagactttgaccaggcattgcgttctacggttctgcgtatttcttttgatggaaacgaaactgtatgggtaccggtaggagactttttcggaagcgggaaccgtctttctccgtttcagactttttataccgaagtaacatccgattcactgttttcttgcttttgggtaatgccctatcagaaagattgcaggattgcattgcagaatgtggggacggacgaggttgaggcttctctgactgcatacacctcggcttggaaatgggatgaaagaagtatgtacttcggtgcggggtggacggagttctctcatctgcatacccgtacaaatccggataagcctacgacagacgaccactttgaagtaaatttcgtgaaactgaccggcagaggagtatatgtgggcgatggggtaaccttgttcaactccttggccgactggtggggcgaaggtgatgaaaaagtgtatgtgaacggtgaggaatttccttcgcacttcggcaccggtacggaagactattacggttatgcctggtgcatgcacaatgttttcagccatccgtttattgccgagccggatggaacaggctccactcagtgtgggcacgtctccaatgtgcgctatcgtggtttggatgccattcctttcagcaagtcattgacgtttgacatggagatatggcattggggcagtacggtcatcaactatgctcctactactttctggtatatgctgcccggtggagcatccaaccgcaaggcggaagctgctaaagcatctgcggatattgcaaagcataagaatgatctggtgagcaatgtagccgttgccggaaggaaggtggaaggcgaatatttggatattcggctgaccggaggaattgaaagatcgcaaagtatacctgccatgaactggagtaacggtgcccagttcttttgggctgaagcaaaggaaggcgataaagcttccttaggctttaaagtcgacaagggaggcaattatcggttgaaaatagcttttacggtagcaccggattatggttgtatagatttgtacctgaacaaccataaactgaaagaaaacctgaatctgtatagtaccgggctggcaacgaatgtattggatttggggacagttactttgcaagacggctctaatgaattgctgattatacagaaaaaggctgatagccgttctgcgaattcattgttgggcatggattatttaataatacaataattaaggataatatgaagaaacaaattctgatgtttgcattatgttgcctgacgacatgctcttcgtcgtcggcgacaaaagaaaacgagccggaagaacagccgaagaatgtctatcgcaatccggtgataaactacagtttgcccgacccttctgtgataaagggcggtgacggctactactatctgtatgccaccgaggacatacgtaatctgccgattcaccgttccaggaatctggtggattgggaatatgtaggtactgcctttaccgaccgtacccgacctgattttgagccgaacggcggtttgtgggcaccggacatcaacaagataggtgataaatacgtactctactattccatgtccgtttggggaggcgagtggaattgcggcatcggttgtgccactgccgataaaccggagggacctttcaaggaccacgggaagatgttccgcagcaatgaaatcaatgtgcagaattccatcgaccctttctacatagaggagggaggaaagaaatatcttttctggggcagcttccgtggaatctatgcgattgaactgtccgatgacggcttgtctttgaaggaaggtgccacaccgcagcaagtggcgggaaccgcttacgagggtacttatatccataagaaagacggacattactatttctttgcttccataggaagttgctgtgaggggttgaacagtacctacactaccgttgtagggcgttcggacaatcttttcggcccctacgtcgacaagaaaggcggtagcatgatggacaacaagcacgaagtgctgattcagaaaagcaatacctttgtgggcaccggccataactccgagattgtgacggacaatgccggtaatgactggttcttctatcatgcggtgagcacgaagaatcctgaaggccgcgtattgatgctggataagattagctgggaagacggatggccgacagtagaaggctccgttgcatctacagaatcggagaaacctgaattctgacgagtatgaagaattttattttagtatccttgttggccttgcttatgatgggctgtaaaacatcgaatggaggtgccttggaaatagtggaacctaccgttgaaatgcgggataatcccgaaggagtagcttcgtttgctccccgtttctcatggcagttggcaaccggcaagcaggatgtgatgcagactgcttatcagattgaagtggcagattcggaaaagagtttgcagaccggggccgggctggtatggaacagtggtcgtgtggagtccgaccagtcggtgctggtgaaatatgcaggggcgcctttggagtcgggacagaaatattattggcgtgtcacggtatggacaaataccggtgacaaagcgcaaagcaatgtccggcactggtcaatgtccttgctggacagttcggactggaaagccggctggattggactgaacgacagtacaaacttgaaactggacggtgaacggaccatccttccggcacgttatctgaggaaggagtttgatttgccgtcacagccgaagcgtgcagtcctttatgtttcgggagtaggctcttccgtatgctatatgaatggcgagaggattggaaacgatgtattcggtcctttgcctacctggtacgatgcttctgtatcttatctgacctatgatgtcacccccttgttgaagtccggtaccaatacgataggcgtggctctgggcaacggccgctatctttccatgcgtgccaatgggatggtaggctttggcttacctcgcctcatggcgcagttgaatatagagtacgacaatggtgagacggtgtcggtagtcagcgatgattcctggaaagcgacgaaccacggtcctataactgcgaacaacgaatttgacggtgaacattacgatgcccgcttggaattgggtaaatggacggaaagcggctataatgattccggatggcagttggccgaacggatggaggctcccaaaggaaaacttgtggcacagctctctccgagtctgaaggtgatggaggagataaagccaatatccgttaaatcggtaggtgatggaagatatatcgtggatatggggcagaatatggtaggaatacagcaggtgaaactgcgtggcaagaaggacaagcccattactatgcgttttgccgaagtgctgaaggacaatggtacggaactgtatcttgacaacctgcgcagtgcccttgtcacggatatttatactcctgccgctgacggtgagtttgtttgggaaccgctgtttgtttaccatggtttccgttttatggaaatatccggtttggactatgaaccggcagcggatgatttcatcggtaaggtggtgtatgatgaaatggcaacgaacggtacgttcgagacttccgaggagttgattaacagaattcacaagaatgcctattggggaatccgtggaaactatcgcggtatgcctaccgactgcccccagcgtgatgaacgtcttggatggctgggcgaccgcactaccggtgcctatggtgaaagtttcattttcggcaatgccttgatgtataagaagtggctggtggatatagaagagtccatgaatgaaaatggaagtatctctgtggtatctccccgttactggaccatcttccatgatgacgtgacttggccggctgcctatttttacgtagccgacatgctttaccgccagtttggcgatgatagctccatcaaagagcgctatccgtccatgaagcgctgggtaaaccacatgacggagaccaaaatgaaggactatattctggtgaaggatgaatacggggattggtgcatgcctcccgagtcgccggagctgattcattcggaggaccctgcccgtaagacgaacggtgaagtgttgagtacaacggtgttttacagtattctgcaactgatggagaagttcgcgcaaatgaacggacttccggcagatgctgaagagtatgcagcacttgccattaaggtcaaggacgcttataacaagaaattcttcaatactgagactgcacagtatgacaacaatacggtgacggcaaacctgctttccctcagactgggtctggttcccgacggatatgaagataaagtatttgccaatgtcgtggagaagacggaaaaagactgtaagggacatgtcagtgccggtgtgcttggcatccagcatctgatgcgcggacttaccgagtacggcggactggaacttgcctataagatagtgaccaatgacacttatccctcatggggttacatgattaagaagggtgcaaccaccatttgggaattatggaatggtgacacggcaaatccggcgatgaattcaagaaaccatgtgatgcttttgggagacctgctgatatggttctatgaggatcttgccggtataaaaaatgctcccgcttccgtcgggttcaagcagattctgatggaaccggtattcccggaaaaactgaattatgtgaatgcttcgcatgtatcgccttatggcaggatagggagttcctggaaacgtgacggcaataagctggagtggaacgttgagattcccgccaatacaaccgctacgatcaagctgccgcttgacttccatgtacaggtagatgccggtcaggcggggattcattccgtggaggaggctgacggtaagctggtagtcgaattgggctccggcaagtatgtattcatgtctgaatgatattttctaacaacaataaaacagatgtaactatgagactaaaaagattgtttttggggataatgctctttacgggcattacgggtgcaggagcggcaaatgctgctccggaagacatctctgcttctatttccttgaaagtgccggggaatgatgccaagcaatatccgctggccttgcagaagatgcaggatggtatgtacagctgccgggcttcggaaacgttgccattggacatcatccgccaggtggtggacaaggatggcaaactgcgcattaccgtcacactcaaggcactggaaaatgtgtatttcaactatggggaacagataaagaccggttacaagcattcggactgccagttctacatgccgggcttctggtatcgccgcaacctgcgttcgccgaaggaagctccttctttccacacatcggacagttggctggtgcgtgaggaccgtttgagcactccgctgacggcagctttcaatccggcaagtggtacgtccatgtcggttatccgtattgacaagttcgataaggaagctttgaccactcataaggagggagaggtaatcttgtccggtgagacttccatcggatataccggtttctgcaatgtggatggtatgactgtcttggcatacggtttcccctataaggaagcaccgaagacatatatccgcaaattgacgctggctcctgccgttgaggctttccagttgcttcgtaagggtgacagcatctccatgacttgggaggtgtccgaaaggaatgctgccgatttttcggaatgcgtacagcgcacctgggagtattgttatgacactaaccgtccgaaaccggttgacacaccttacacggtagaccgcatgaaggaggtgatgagcaacttcttcgtggaaagctatgttggcaatacccccactcattattattccggtgtagagttggagactgctacttgtgccaataccgatgttgccgaagtgggctttgtgggacgtacattgctgaacgctttcaatgctttggagtatggcaaacagcagaaccgccaagacctggtgtacaatgccaaccatatctttgacacttatctccagaacggtttttcgcctgctggtttcttcaacgaagtggtacactacaaccgcggcttcaaggaaaccagacatagcatccgccgtcagtccgagggagtgtatgccatcttgaactatttgaactacgagaaacagcagaagcgtaaacaccccgaatgggagaaacgcatcaagggcatgctggacagcttcctcaagttgcagaacgaggacggcagcttcccgcgcaagttcaaggatgatttctctatcgtggatgccagcggcggtagcacgccttcggcaacattgcctttggtgatggcgtccaagtatttcaaggacaaacgttatctggcaagcgccaagcgtacggtagactatctggagaaggaactgatatccaaagccgattatttctcttctacgctggatgccaactgcgaggacaaggaagcctccttgtatgctgctacggctgcttattatctggctttggttaccaaaggagaagagcgtgcgcactatgccggtctggcgaagaaagccgcttattttgctttgtcgtggtattatacttgggatgttccttttgccgaaggtcagatgctgggagatatcggcttgaaaacccgtggttggggaaatgtgtcggtagagaataaccatatcgatgtatttatcttcgaatttgccgatgtgctgcattggctctccaaggagtacaacgagccgcgcttctctgactttgccgaggtgatttccacttccatgcgccagttactgccatatgaaggacacatgtgcggcattgccaaagtaggctattacccggaagtggtgcagcataccaattgggattacggacgtaacggaaagggatattacaacaatatcttcgctccgggctggacggtcgcttctttgtgggagctgttcactccgggacgtgcggagcagttcttgttgaaaaaatgatagtctaaacagtaaccaatattgtatttatgaataagatgatgactttgttggcaagcgtgatgctattggcatcggcttgcacgggcaagcaggcgagtgaaaagactgcttctggactggaacctgccaacttccgtacggaagtggatggcaagcagacagacttgtttgttttgaagaataagaatggtatggaagtttgtattacgaatttcggcggacgtattgtatcagtgatggtgccagacaaggatggcgttatgcgtgatgtggtgctgggcttcgattccattcaggactacatcaagttcccttcggatttcggcgctaccatcggacgttatgccaaccgtatcaaccagggtaagattacagtggatggggtagagtatcagctgccgcgcaacaattacggtcattgcctgcatggaggtcccaagggataccaatatcaagtgttcgatgcccgccagttgagcagtcaggttctggagttgacttatctgtcgaaagacggagaggagggcttcccgggtaacctgacctgcaaggtcactttctcgctgacagatgacgatgccatcgacattcgttacagtgccgaaacggaccgtaccactgttgtcaatatgacgaaccattcttactttaacctggacggtgacccctccaagtccaattcggattatctgctcactattgatgcagatgcttatacccccgtggacagtaccttcatgactaccggtgagattgtttccgtagaaggtacggatatggatttccgcactcctactgctgttggcgcccgtatcgacaatgactttgagcagttgaagaacggcaagggctatgaccacaactgggtactcaatacgaagggcgatgtcacccgcccgtgtgccaccctcgaatctccctcaacgggtattgtgcttgatgtctataccaacgaaccgggcattcagatttatgccggtaacttcctggatggcacactgaccggaaagaaaggtattgtgtacggtcatcgtgcttctgtctgtctggagactcaaaagtatcccgatacgcccaacaagccggaatggccttctgcattgctgaagccgggagagaagtatgacagccattgcatttatcgcttctcggtgaagaaataaatataaggcaggcatagcctgcctttatgggatggatataaatatgacaagaagcctgaagtattgaggcgtacgtttgtttgtccctatatctttggtgacggagaggaacattccatcatttcccattggaagtataatgatggttatggcagtgttgaacttattagagtaactatagatggtgtggatgcccgcatcgaatcaggaacagacaaatatcacccgttagttgtcgttgtgttggcaaagtaacttgtttttcttaaatactctgtcttggtaaaatcagcactttatcaagacagagtttttattctttggaattaccgcatcgccagcgccttattctccgcctcctccataatctcccgttctcccggccctttgtcattgattccgcaaaggtggaggatgccgtggatgatgacccggtacagttcacgttcgtagttgttatcggcgaactgttccgcattggtgcgtacggtatcgaggctgatgaagaggtcaccgctaaggcggttgccttcacagtagtcgaaagtgatgatatctgtgtaataatcgtgttgcagatattggcggttcacttcgagtatcttctcgtccgagcagaagatataggctatttcaccgactctttttccgtaagtggcggctacggattttatccattccgttgtttcacgtttcttgatggagggcatttcaacgccgtctgtctgataactaatcattttatttacaattttacgatttacgattgaaattacattcctgtgattaagacagtttctttagaagaagaacatataactgataataatcgctgcaatgatgccggagaaatcggcaatcagcccacacgtcacggcattcctcgttttggtgatacctacgctgccgaaatacacagcaagaatatagaatgtggtgtccgaagcgccacgtgccacgcaactcatgcgtcctacaaatgaatcggcgccatactgtttcatggtgtcaatcatcagtccgttggcaccgctgccgctcagtgacttcatcagggcagtgggtagggcacctacaaagctggtatctacactgaatagtcctactacataaccgataccgttcaccagtatatccatggcgccggaagtgcggaaaacggcgattccaacgagaaaagcaaccagataagggataatgcgtatggcagtggtgaagccttctttggccccttcgatgaaggcatcgtatacattgatttttttccatagcccccagaggatgaacagcaggatgatggagaacagcagtatgttggcaattaaagtggaatatacacccatttcatcacggctaatctgtgtgaacagataaatgagcgcggcaaagaaaaggctgatgcagccaatcaggataagtatgggcttgttcaacaggttgatgcgttgtgcaatgctgacggcaatgacaccgacaatggtcgagatggcggtcgttatcagtgtggggataaagatgtccgtgggttgggcggcacccatctgcgagcggtacatcatgatgctgacggggataagtatcagtcctgaagtgttgagtacaaggaacatgaccatcggattggtggcggtgtcctttttagggttcagttcctggagttccttcatggctttcagtcccatcggagtagcggcattgtccagccccagcatgttggcagagagattcatgaaaatggagcccatggcaggatgtcctttcggtatttcgggaaagagacggcagaataccggactcagccaacgggagagggcattgatcatgccgctgttttcgcctattttcatcacgccgagccagagggcgagtattcctgtcagtcccagggatatttcaaaagctgttttggaagaggagaaggtggagttgacgagttctgtgaatatctccacatcacccataaagatgagtttgcagagggctacgatgaatgcgatgacgaagaaagctacccagatgtaatttaaaaccatgtatcgttactttgtttctagtggattaatatttgttttcgttagcaagattccaggcgttgaggaaagctgctttggttatttctatcattttttcccagttcagccagtcggtgtggtccgaaggctggtgataatcgggatgtccgtctgtgtggtaccagatgatggggatgttgcacagggcaaaagaagcattgtcacttcctcccgtggggcggtcccaggcgcggtagtccggttgcaggcgcaagctgtagcgtgcaatgtcctgcttcagccagtcgccgaatacggggtgggcggtggtgtagaagtagacaacgtgttgaggctgctcgggcttattgttacggcctatcatgtcgaaattaagataacctttcacctggctgatgaaaggacagctttgtacaaagtatttggagccgagcaatcccttttcttctccgtcccaaaaggcaaagatgaccgtgcgcagaggcttctgcccggtggcaagaaatgcacgggctatctgcaggacggcagagacaccggaggcattgtcgtccgcaccgttgtatatccggtcgtttgccagcgtctcgtccgtacccaggtggtcgaagtgggcacctacgatgacatattcatccggtcgttctcccgggatggttcccaatacattgctcatctgcaggatgcggtgggtgccttgttcgaggatggtgatggagtcgggatgcacttgccaccgtccccgttgctggcgttccttgttgtatgcctcgaagggttgataataattgtccttttccagcggggcaatgccggcttctttcaggcaggatgccagatagcgggcagccagtcgtgaaccgtgcatgcctgcttcgcgtccttgcagctcatcgtcggccagaaaaccgacaatagcctcggccgaagtgcggctgatgctttgcaatcccttttcttgtggagattgtgcatgtaaggatagtgcgaaagaaaggcagcagattgctcccaaaacagctttatacatgtcgtacggttttaaggattggacataccggtggcaaaattaaagataactttccatagttccgatataaatgtcgtatttttgtccgttggcggatgaattcaaatccgtgtaaatcaaatgagagaaggatgaaaaagaagaatgaagcagtggaaaccgttttgtgcgaacgtgtgctttcggcagaagaagtggcgtgcatctcggcacagattcagcaggaattggaggcgtatatcgacccggtgaaaagggagtatcttccccgtttcttcaagaccggaaaggggcagtatggcgagggggataagtttctgggagtagttgtgccgaacactcggcaggtggcaaaacagcacaagcacgaacctttcggggtgatggcagccttgcttcagagtgaatggcacgagtgtcgcctttgtgccttgctgatgttggtggagcggttcaaaaagagcgatgaaaaggggaaaaaggagatttatgacttttacctttcgcaaacgggccgtatcaataattgggatttggtcgatttgtctgcccccggcattgtgggcgaatatctgaaagacaaacctcgcaaggacctctaccggctggcggatagtccgctactttgggaccagcgcattgccgtggtatctacctatactcttatcaaaaatggtgatttcatcgatatattagccctttcggaacggctgctccatcataagcatgacttgatgcaaaaggcggtaggatggatgctccgggagatgggtaagcgggacaaggacttgctggtgcaattcttggagaagcattgcaggacgatgccccgtaccatgttgcgctatgcgatagagaagttttcggacgaggagcggaaggagttcatgaagcgttgatggacgagaggcagtgttttatcattccttctatcgcttatctcaaaataaattagttattttgcagaaaacaaaggaatctggaatggaacaagaagattttgatatacgcaaccagcagcccgtcaccagccgagaacgtgatttcgagaacgctctccgtccgttgaattttgaggatttcagcgggcaggacaaggtggtggacaatctgcgcatatttgtgaaagctgcccgcctgcgtggcgaggcgctggaccatgtgttgcttcacggccctcccggattgggaaaaacgacacttagcaatatcatagccaacgaactgggcgtaggtttcaagataacttccggtccggtactcgacaagccgggagatttggcgggagtgcttaccagcctggagccgaacgatgtacttttcatcgacgaaatacaccggttgagccccgtagtggaggagtatctgtactcggccatggaggactaccgcattgatatcatgatagacaaaggtccttctgcccgaagcatacagattgacttgaatcctttcacgctggtgggagccaccactcgcagcggtctgctgacagctccgttgcgtgcccgtttcggcatcaacctgcatctggaatattacgatgatgatgtgttgagcggcattatacgtcgttcgtccggcattctcgatgtgccttgctccgtaagggctgccgccgagattgcgagccgcagccgtggcacaccgcgtattgccaatgcattgctgcggcgtgtacgcgattttgcccaggtgaaaggttcggggagcattgacacggaaatcgcacagtttgcccttgaggctctgaatatcgacaagtatggtctggacgagatagacaataagatactctgtaccatcatcgacaagttcaaaggcggtccggtgggattgactaccatcgccactgctttgggcgaagatgcaggtacgatagaggaagtctatgaaccgttcctgataaaagaaggtttcctgaaacgcactccccgtgggcgtgaagtgacggagcttgcctacaagcatctggggcgaagcctctatagtagccagcgtaccttgtttggcgacgagtgattcattttaagaaaacgaatacagagatgcggagacataaagtctctctttcctcttatcctaaaaaactctgtgcctccgtgcctttgtgttcataacaaccattaaagaagtggccggattaaaatcattggcaaaagaaactgccatttatgggttgagcagcattgtggggcgtttcctcaattacctgctggtgcccgtatataccatggcgatgtccgcacagagcggaggctatggcgtagtgacgaatgtatatgcgtgggtggcgctcatgctggtgttgttgacgtgcggcatggagaccggtttcttccgctttgccaataaaggagaggatgacccgatgcgggtgtactccacgacattgctcagtgtgagtgtgggggcgcttacctttcttgcattgggattgctgttcctcaaccccattgccggatggctggagtatggtgaccatccctggtacgtgggcatgatgatgattgtggtggcgatggatgctattcaaagcattcctttcgcttatttgcgctacaagaagcgtcccattaagtttgcggcactcaaactgctgttcatcttcctgaacattgcactgaatctgctctattatgtagggatgaaaggggatgacgtgggctatgccttccttttcaatctgatatgtacctctaccatcatgctttgcatgattccggagttgcgtgggttttcctacgtgctggacagaaaactgctgaagcggatgcttgcttattgtctgccgttgctggtactcggcttggcaggtatcctgaatcaggtggcggataagattatttttccttttgtctatccggatgaggcggaagcttccgtacagttgggcatttatggggctgccagcaagattgccatggtgatggcgatgcttacacaagccttccgctatgcatacgagccttttgtcttcgggaagagccgggacaaggacaacaagcagatgtatgcgcaagccatgaagttcttcatcatcttcacactgctggcattcctcgctgtcatgttctatctggacatcctgcgccatattataggtcgcgactactggccggggttgcgggtagtgcccatcgtgatggctgccgaaatctttatgggtatctacttcaatctttctttctggtacaagctgattgacgagacgcgttggggcgcttatttctccctgataggttgcacggtactggtagtgatgaacatacttctgattccccgatacagctatatggcttgtgcctgggcaggcttctgcggttacggcatcgccatgctgctgtcttacttcgtggggcagaagaagtatcccattcagtatgacctgaaagccattggcggctatgtattacttgcggcagttctctacctggcagcagagtatgtcccgatagataatatctacctgcgtatggcataccgaactatattgttgctggtctttgtggtctacatcgtgtggcgtgatatgcctctcggcagtatccccgtcatcaacaaactgataaggaaacagtaaattcaatcgtaaatcgtcaaatcgtaaatattatggattctgataaaagaaactcctttgccgtcaagacctttctgaaagagtatcttgatttgcgtaaagacaaggacaatgaactggaaactgtagactccatccgtaagggagtggaattcaagggagccaatctttggattctgatattcgccatattcatggcttcgttggggctgaatgtgaactccaccgctgtgattatcggtgccatgctcatctcaccgctgatgggacctattatgggtgtggggctttccgtgggactgaatgactttgaactgatgaaacgttcattgaagagcttcctgataaccactttgttcagtgtgactacggctaccatattttttctggtcagccccgttgccgaagggcagtcggaattgctggcacgtacatcgcccactatttatgatgtattcatcgccttgatgggcggcttggcaggtgtgactgcgctttctaccaaagagaaaggaaatgtgattcccggcgttgccattgccacggcgctgatgccacctctctgtacggcaggttacgggctggcaacgggcaatctgatttacttcctcggcgcattctacctttattttatcaattccgtgtttatcagtctcgccacttttgtaggggtgcgtgtgatgcacttccagcgtaaggagtttgtagacaagaatagggagaagaaagtgcgcaaatacatcatcctgattgcagtgctgaccatgtgccctgctgtgtatctgacggtaggaatcattcaggataccttctttgaaagtgccgccaaccgctttgtcaacgagcaactctcctttgagaatacgcaggtattggacaagaagattcaccatgacggcaagggtcatgaaatacgtgtagtgttgatagggcaggaggtgcccgaagcttccattgccattgcccgcagtaagatgaaggactataagctcgataacaccaagctgattgtgcttcagggcatgaacaacgaagcggtggatatttcttccatccgtgccatggtgatggaagatttctacaagaacagcgagcagcgcttggtggagcagaaacagcagattgaaactcttgaacagaatctggaaagatataaaaccttcgatgaattgggcaaaaagattattcccgagttgaaggtgctctatccatcggtgaagacagtctcaatatctcatgcgattgaactgacggtagattcggtacgggtggatacagtgacccttgccgtattgaagttcggcaaacacccggctgctcacgagaaggaaaagattgccgaatggctcaaggcacgtacgggagccaagcaattgaggctgattacggaatgacaacatcccccgagggggtagaaatatacttatttggcatgaaattaagatttatactgatagccgtctgcttcctcctctctctgccgggacaagcggatgaagggatgtggatgctgggaaacctgaacaagcagacacgccggaccatgaaagagctgggtttgcagatgcctgttaataagctatacaatacgaaacgcccgtcgctgaaggatgcggtagtcagcttcggaggcttttgttccggggtggtggtgtccggggacgggctggtgtttaccaatcatcattgcggtttcagcagcatacagcagcattcgtctgtggagcacgactatctgaaggatggttttgtggcacataatcttagtgaggagcttcctaatccggaactttatgtacgtttccttttacgtcaggaagacgtgacccgccgcgtgcttggggcggtaaagccggatatggatgaggcggggcgtacgagtgcggtcgattcggtgatgctggttatcggcgaagaagtttcccgcaaggactccacgttggtaggcattgtggatgcttactatggaggcaacgagttctggctttccgtttatcgcgattacaatgacgtgcgtctggtgtttgcaccgccttcctcggtaggcaagttcggctgggacactgacaactgggaatggccgcgccataccggtgatttctccgtattccgtatctatgccgataagcataaccgccctgccgattattctcccgacaatgttccctaccgtcccgaatatgtagccccgatttcccttgacggctaccgtgaaggttccttctgtatgacgctgggctatccgggcagcacggaacgctacctctcctctttcggcatcgaagagatgatgactaccaccaaccaggcgcagatagatgtccgtggtgtgaagcaggccatctggaagcgtgaaatggatagccgcgacagcatccgtatcaagtatgcttccaaatatgacgaaagctccaattactggaagaacagcataggggtgaaccgtaccattaaaaagttgcatgtgctggataaaaagcgtgccttggaaaccgaactccgccgatggatacagcagaccccaaaggaacgggaacacttgctgcaccttttcactgatttggagttgaactacaagagccgccgcgaagcttatcgcgccagggcttactttgccgagtctttcctgaacggcccggagctgatacagcttgctttgtccatccttaatttcgactttgagggcgaagagaaaacggtggttgccaatctgaaagccatcgttgagaagtatgccaatctggacttgggcattgacaaggaagtgttcgcggcactgctgaaagaataccgttcccaagtggattcgacctaccttcccgagctctaccagacaattgcaacagaatacggaggcaacgagcgtacctacgtagacagcctttatgcccgttcggagctgaccacgccccgtggattgaagcgcttcttggagcaggacaccacctatcagatatataacgaccctgccatcagtctgggtattgatctgattacaaaactattcgagatgaacatggaggtccagcaggcctccggtgaaatcgagcggaatgagcgcttgttcaatgctgccgtgcggcggatgtacgcatcccgtaacttctatcccgatgccaactccaccatgcgcttgagttttggcactgtgtgcggctatgctccgtccgacggagtgaaatatgattattataccaccacgatgggcattctggagaaagtcagagcccatgcaggcgatgtggattttgaagtacagcccgaattggtatccctcctttcctccggtgactttggcagatatgccgatgaaaagggtgaaatgagcgtttgcttcatttccaacaacgacattacgggaggcaattccggcagtgccatgttcaatgccagaggagagcttctgggacttgccttcgatggtaactgggaagctatgagcagcgacatcctttatgaaccgaagatgcagcgcaccatcggggtggatgtgcgttacatgttgttcatgattgagaaatatggaaaggcaggtaatctgattcaagagctgaagattgccaatccttaacgtgtgcttccctgcctatgcttctttatgggtgatatttcctaaataactccgcggatacggtcatcgaatgctgaaagcgccgctttagccccttcgcccatagcgatgactatctgcttataaggaacatttgacacatctcctgcggcatatactccccgaagtgtcgtacggcagaaagtatcgattttgatttcccctgccggagtcgtttccaagctgtcgcggaatggggcactgttggctgccagaccgatttgcacgaagataccatccaagggatagtcgcgttcctcgccggtaagacggtctttgatgcggatggaagttacattttccccgtttccatcgacttttgtggtctgcgacgaggtgaagatttccacatttggcagatttcgggctttctcctgcaacacttggtcggctttcagcgtatcggcaaactcgaatatggttactttcttgcagatgcctgccaagtcgatggcagcctcgatacctgagttgcctccaccgatgacggctacgtgcttgccttgatagaatggtccgtcgcaatgcggacagaaagctacgccgcgtccgatgtactctgcttcgccttccacattcagtttgcgccagctggcacccgttgaaatgatcactgccggtgcggtgaacacttcgccgcctataacggagatactcttctcccggccttgcaattccaccttctctatcttccgctcctcgaaaatctctatcgggtagtgctctatatgggtacggagtgcattggcaagctctgttccggtagtttgtggaacagaaataaggttttcgatgtccacagtctctttcacctgcccaccgatacgctcggcaacgatggcaacccgcagtcctttacgggctgagtagatggcagcggaagctccggcaggaccgcctccgagcaccaatacgtcgaattctctttgtatgggtgtttcgtccgtttgcggagcgctaccgaaggtctgttccagcttttgcagcaattcgccgagcgaaccccgacccacgtgcaacagtttgccgttggcgtagacagacggcacgccttgaatcttcagtgcatccacttcctcctgatagagggcgccgtccaccatctcatgagtgatttgcggattcaggagtgtgatgatgttcagggcttgtaccacgtccgggcagttggtgcaggtcagtgatacatacgtttgcaggcggacggggccttgcagggccttgatgcggcggctgatggcttcgtccggtagatttttcccctttccatcggcattcagtacggcaagcaggagagaggtgaactcgtgtccactgggtatgccccgaaactttatgccggtctccacaccttctttcagtaacgtgaattccagtcctgggttgtcggtctcggtcaataggcaggacagcttctcggaacaacttgccacattattcaagaacccgatgaactcttgggcttgctcgtgttccggattataggtgatatggaagatatagcgggcttccaaatgctggaatacgctccgcacttgatctaaaatacttgtttctaacatgattaatatgggctgttaaggttggacgagagggtaccgtcggtttctcgtattggaactaacggtgccaaagtgggaaacacatttggcaccgtttaggaattaaatctttcctacgaggtcaatgctcggtttcaaggttgcggctccctttttccacttggccgggcagacttcaccgtcatgtgtggctacgaactgcgcagcttccaccttgcgcagcaactcgtctgcattgcgtccgatgttgttgtcttgtatttcggcaatcttgattttaccttcgggattcacgaggaatgtaccgcgataggccataccttcttcttcaatcatcacaccgaacgcgcggctcagtacgccggtcgggtcggccagcatcggatacttgattttgcggatgctttcggaagcatcgtgccatgctttgtgcacgaagtgcgagtctgtacttacagaatatacttctacgcccattgcctggaattggtcatatttctcggcgatgtccaccagttcggtagggcatacgaaggtaaagtctgccggatagaagaagaaaatggcccatttgccttttacgtcttcgtgggatactgttttgaaatttccgttttggaaagcctgaactttgaattcaggaagttgggaattgataattggttccataatttttcttttttttataggtttagttctttgtttttctcgttgcaaaaatatagcattttttcccgatagaacaagaaatctgattgaaaggttttatggaccgatagataaaatctatacaatggcttgggttgccttcagagagagcatttccttaggtatagaggacttaatctctttagtcagtgcttccagcagagtatggcggataaagttcttgttagtgagcatcacgatttgccgggtagggcagggaatggcgaaggggcgtaccagttctttctggatatcccccagttgcagaacggccagttcggggatgaaagtcacacctttaccgctttctaccatgcgcatgaaagtctccatgctgcccaagtgataggcaagctggctggcgcgtgccgacttcatctggcagaaacgcaccagctgatcgcggaagcaatgaccctcgtcgagcaaccaaagctgttcgccgttcaggtccgaagtacggattacctcgctgttgaagaggatgtctttgcgcgacacgtagacaaagaattgttcatagaacagcggtgtctgctgcagctcttccatacctgccagactcgctacgatacctgcgtctatttctcccgtctgcagggctttcttgatgtcgtttgttttcatttcgattacccggatgtcgaggtcggggtatttcttcatcagttgaggaaagaagcgaggcaggaggtaaggagccacggtaggaagtatgcccaacttgaaggtaccggtcagtgaatgtttttcttcttctataatattctttatacggttggcttgaaccaatatcttctgtgcttgttctatgatgaggataccgacgggagtggggcataccggttgctggctgcggtcaaaaatccgggtatccagttcctcttccagtttctgaatcatggcactgagggtgggctgtgttacgcggcaatattcggctgctttggcaaagtggcggaactggttgacggcaaggatgtattccaattgttgtaaagtcatgatgaacaaggcatttgaaggttatgtatagaattcgtctatgcaaagatagaaattatctgtttgacaagttttgatttaccccttatctttgtaataccccaaagaaaaatagtataaatatttaaaacaatagaattatgaaaactttagattacttgtatttgaatgaaaagaaagtggctggtgtagcatcagcattgcaccaattgttggccgatttccaggtacattacaccaatctgcgcggtatgcactggaacatcaagggacacagtttctttgtgctgcacgagaagttcgagagtatgtatgacgataccgccgagaagattgacgaaattgcagagcgcatcctgatgctgggtggcgtgcccgaaaataagttcagtgaatacctgaaggttgccaacgtgaaggaagtgtcagacatctcttgtggcagtgaagctgtagatcatatcctcgggacatatggctacctgattggcgaagaaagaaaagtgattgaattggcaaatgaagctggcgatgacgtgacagcagatttgatgactagctacttgaaagagcaggagaagatggtctggatgcttgttgcattcagcacgaaaagttgcacgaaataaaaagtcgtaaaaagataatagagtgataaaaccggtagtggatgctgccggttttatttgtagagtataattaatttctatcgttctgtaccttagattcaaagattctgcgaaccataataagacccttatcagagtggcacgtttgcaggagcatatcgtcaactgccgcaaagataaccttcgcaagatcatccatgcactcacgtacgatagccaagtgcgcactgtctgcatggaggacgtgaatgtgaaagcaacgtagccatggccttgcacaagcggtcggggggggacatctttcgggatgttcctcgtgatgcttgaatatagatgcaagtggtatggtgcaaaccttgtcaggatagaccgttttgccctaagttcgagaacttacagtaatttgaatgaaatttggtatatccgtttgtttttcgtatatttgcaaaaatagcaggctccaatctactgttttttagcacataaattcttttttgcgcatcggataaatttcatcccttcttaaaaatcacacaggtcctgcttatagaaatcattttataaaccattgtggggtatcggacaaatatccctgtcaaaacgtaactttatgcgatataaagaaagtttgctattgccattctttggggcaataatagccgtttcacctttggcggcacaggaaaaaacgatattaaagataggaggcacactccgtttcaactgcaattactcggattggaaatccgaaaaccggaaacatggtgaagagttcgatttcgacgtgttcctcttgaatgtgaacgcttcttacaagaaattcgatttagccgtagattaccgcttctatcccgcctctttgggagacgggatgctcagggagggctggataggttatagcttcaacaaatcacactagctacagatggggttgacaacagtacctttcggcatcctgccttatacaggcaacaattacttttttaatctgagctattatgccggtctcgagaacgatgcggacatgggggataaaatactttttccgcaagaatcggtgggagttgtctctcgcctatttccagaatgctgacttttccggaactggtggagacacagaactgtccgctagccgttatgcctatgacatcgctggacgtgataaggaggtgcatcagggcaatgtccgggtggtatatcatttcggaaacttgtgaagacagcaactcggaggttcggtactggtgggtgggctatataatatggacacacggaagacggggttccgttccgatttcgccctacactacgtcgtcgactatcaatggtggaaccttaaaatacacaagttgtttttggacagtatctgcttgtacaatgattttagcttgctgaacaaacgcattgctgggttcaatgacagcttggagaacgtgacgggatgttcgctgacgatgggaaaggtgttctcctacattgactatgctgtgggaaggaatcacgcatggctgggggatgtataggatgaagcttttgtccgggggacggaagacaattggagtgtcaaattcaatataaatataggatattatttttaaagaattatggataagaacaaagttgagatcaggaatttgtatttgattttcggttctgaaaaaaacaaggctttcagaatgctgaaaaaaggaaagagtaaaaatgagatattgaaggagactggatgtacgattgccgtgaacaatgccagcctctctgtccgggagggtgagatatttgtgatcatgggactttcgggaagcggaaagtcaagtctgctcagatgtatcaaccggttgaataggcctacctccggcgagattctgatcaacggtgaggacatcgctggaataccgatggagcggttgcgttccctgcgccggaaggaattggcgatggtattccagcatttcggactgctgccccattatactgtattgcaaaatatcgctttcggacttgagttgcaaggggtggagaagagggaatgtgaattaaaggcagcagaaagcatgcgtttggtcgggctagacggatatgccgacctgatggtcagtgagctgtctggaggcatgcagcaacgagtgggactggcacgtgctctggccaacgatccggaagtcctgctgatggacgaggccttctcagcgctggacccgctgatacgggtacagatgcaggacgagctgctggccttgcagtcaaagatgaaaaagaccatcgtatttatcacacacgacttggaggaggctgtcaagttgggtgaccgtatcgccatcatgcgtgatggggagatacagcaaaccggcacttccgaggagattctgaccacccccgccaatgagtatgtgaggtgttttgtagagaatgtggaccgcagtaggattgtcactgccgcctccattatggtggacaagcctatggtggcaaggttgggaaaagaagggccagaggttctgactcgaaagatgagagaacggaagacaaccgtgttgcctgtagtggacccggatggtatactggtaggtgaggttcgcctggaagatcttctctggttgcgtaaggagcatatcctgaatatagactctgtgataaagaaagaggtacattccgtattaagtgacactgtggtggaggatatacttcccttgatgacgaagaccaactcgcccatctgggtagttaatgagcgacgtgagtttgaagggatggtaccgctctcgtcactcattattgaggtgacgggaaaagacaagaaagaaatcaatgaaatcattcaaaacgcaataaaattatgataaagataggagaatatatagaaatggccgtggaatggttgaccgagcacggcgcatcattttttgacctgctgagtctgggagtggaaggcgttattgacgggatactgtgcatcctgctcgagatacctttttacataaccatcgtaacactcactttcctggcgttatacaagagtggcagggagacggggggcttcaccctcctagggctgtcgctcgtctacgggatgggactctgggaggagaccatgcagaccctggctctggtactttcctccaccggtatggcattgctgctgggaatccctctggggatctggatggcgagcagcggacgctgcaacaaagtcctgcagccggtacttgattgtatgcagactatgccggcctttgtctatctgataccggcagtgttctttttcgggctgggaacggtgccgggagcctttgccacgatcattttcgccatgcctccggtagcaaggctcaccgcattgggtatctgccaggtgccgaaaaatgtggtggaggccgcccggtcttttggagccacttcttggcagctgctctacaaggtacaattaccgctggcgttgccgactattcttgccggtgtcaaccagaccatcatgatgtctctctctatggtagtggtagctgctatgatatcagctggaggtttgggggaaatagtattgaaaggtatcacgcagatgaagattggcatgggattcgaaggagggattgccgttgtaatactggctatcgtgcttgatcggatcacacagggaatagcacgaaaaaaatagaaggagtagaacatataatgaaagacagaatgattatgagaaacaaaacgaaatttttcacagtcttgttggctgttacgatattcttctcatgcggtaacatttctgacaagaaaatccgtatagcctatgcgaactgggccgaagggatagcggtcacctatctggccaaggagattctctcggagcaaggatacagaatagaacttttgaatgcggacatagctcccatattcacttcgttggcaagaggtaagacagacgtgttcatggacagctggctgccggtgacccatgccgattatttccggaaatacaatggtaaactggaaatcctcgggcagatatacgacagtgcccgtatcggtcttgtggtgcccgaatatgtcccagtccatatgatagaggagctgggcggtcataccggacggttttccggagagatcgtgggaattgatgtgggtaccggtatcatgaaatgcacggagaaagccatccctgaatacggtctggactacaagctcatgatctccagcggtcccgccatgacggccttgctgaagaaggctatcgacaagaaggaatggatcgttgtgaccggatggaccccgcactggatgtttgatctcttctgtctgagagtgctggaagattcgaaaaacgtttatggggaggccgagcaaatccattccattgccaggaaaggattcagtaaggagcatccgttcgttgccgcccttttgggaaacatccatctgtccgataccgagatcagctctttgatgcggaccatagaggaaacccgtgagaccgagacaagagctgtacgccagtggatggataagcatagggatttgatagacagctggattccggacaaggagaaatacaaccgatgaacattacgctggaatggatgactttcaatccttttttcctcgtaaggtgggtgctaactgtcccgccatatttctggtaatattttgaaaaagagtatataccctattattgtcttaatggcatacattgtatggattaaaagactgttttgcgtaattctatgtctaatattcataacaaaaacatggttgtatattcataattttgcattatcaaagttaacatcataaaacaagtatgtttttcctagtaaaactatcagtgacaatatgaaacaagtatgtttttttttcttcctgctgtccagtctgcagaccttctcacaaaaggttgcgttgaaaaacaaccttgcctatgacgccttgctaacacccaatctttcagtagagttctccctaggaaagaaatggactctggacgctcaggtaggtatgaattttttcttttatgagaatgatgccacggcaaatcgttataagacaaggaaatggagtcattggcttgtacaaccggaggtaagatattggacttgtgaaacatttaacggcttattttggggcattcatatccacggaggccaaatgaatgtggcgggtataaatattccttttatcattcagaaccattccagagaaatgaaagggcaccgttacgagggatatttttacggtggtggtgtcagtgcaggctatcattggatactgtccagcagattcagtgtggaggcatctttgggagtgggctatgcacgtgttaaatatgacaaattcagatgtacttcttgcgggaaaaagataggcaaggggaaagccgattatctgggacctacaaagcttgcagtttcgatagtctatatgatcaaatgaatgacgagtcgcgtatataaacataaaaaacgtaattaatgagaccgatagattattatataggaatactctctgttatgggatatgtatactgcttgccactggcaggacaagcagggaataaagttgtcaggggagggaatccccgtctggaatatacagatctgaaagtcggacgtagtacggacgggaaagtgtttactgcctctttcaatatagcaggatctgtcaagcggttgggtgcccaggagattgtctatatctatccttccttggtctcctctgacggcaaaatcaagactgatttccttcccttgtgtatatctggaaggaaaagatataaggccgttatccgtagagagactctgggcggtaatccggatacatcagttccagtgaaggatatccgcaaggccggagatttgaaggggactggaatttctgttcgggaagcattgccttttgagcgctggatggcatccggatatctctctctccgtgaggagatgtacggatgcgctgagtgcggcagaggcgtgagtcaaacgaacatgtcggtgaccgggatagatcttttcgaaccggaagactacgaatataatttttatattcctgaaaaggtggagacaaaatgttacgaggaagagtttgactgtaaggtcacttttaaatctgcacggcacgaacttcttctaggcttcggtaaaaaccgggaagaactggcccgtctggacagctttgtgtccagggaactccggataaaaggggctcgcctccgtgaggtgcacatcaccgggtacgcctctcccgaaggcgaatccagctataatagacatttgtcggaatgccgtactcatgcactttcctctcatgtgttgagcaagtatccgcagctcaagagtgcttccatatatagaatagaaggagctggcgaagactgggaaggtttgagaaatatcataaaagcatctactttggactataagaatgaggttttgtctgccatcgggagacatgatacggatgtggcccgtgaaacggctatccgttctctgaatgggggaaaagtctatactgatttgctatccacggtttatcctgtcctgcgccgcactgtcttccgcatgagcttcgatgtacgtccctatatggatgacgaactggaggaaatgtttattaccgttcccgggtgcctgagcttgtacgagatgtgtagactggcacaactgtatactgaacaaggaaaaaatccggtaaatatatataggaaggcttatgagcagtttgcacctgatccgttggcgacacttaactatgccaatgcgcttttaaagtatgaaaaggatgcggacaaggctctgatgatattggacacaataaagagtgacagccgttctgtttatcctatggcaattgcccacaatatgaaaggtgactggcggaaggcggaggaattgctgaaaaaagatatggaacctttggaatgaaaattccttacttgtatgatggggttaacgaatgaaaaaagcatttaatgtattaataattaaattatttatttactaaacagtttaagttatgaaagtaaacaatttatttttagcaggggttgtagccctaagtctgggcatgacagcttgtaataatgaggatgtccctccggtaaacaatctgggtgagggaacaacatttgtgggaatgtacatttccaccatgaaggatgtctcaaccagagcagtgaatgacaatcaggaagattacggaggaagaacggaagagagtaagcttacagatttacagcttctctcaaatgtcagcccacaagcatggacgttaggagagacagctgatgagactggcaagttttgggaaacgcaaacagccggtacatttaaggtcgctccatggaaaacgaattccggccctcaagccatggcgttgttgtttaacaagggtgccctttccgctgatattgcaacagccgcggatcagacatatggtagtacagctgccgcagtagacaatattgccgctctcgccacagacaacaagtttgtcatgacttcgagagctgagcagaaaactattgttcccggcattaccgaggatgctgccaaaacgggtacaagtgaggctcaaaatgtattctcctttgatgtggagcgtatcgtggcacaaggattggtcgcgaaggatgctgctttggaagaagcaaccgcagataaaaaaggaacggttgatcttgccgacatcaagtatactgccatcaacggtgccgcaaagacataccttttccgtaaccatgcgggaaagcgtacaattggagatgccgatggcctttacgatggctttgcatcagccattgatggatataccgattttaaggcggccaaagaaccggaaggttcagctaaagaaaatttgatccgtttggggaatcttctgtcgaaggacaatccacagcggaatgatcttggtatgtatgcagctaaaggcgttgcagaaaatgttaatactgctaaaaatgtagcaggtatttattttttggaaaattctgtaaaaaaggaagcgcttacagctgaaaataaaaattacggttactatcgtctaccttatgccaaggtttatgtaacttatatccctaatgaagtatggaagcttgatgatgatggaaaaacattggttaaaatggataattatgcaaaaggaacaacgttctatcggggagaagatgacggtcttatctatgccagcaaagaagccgcaaagaaaagtaagtggagcccggaccaaaaagcttatacctatacaagtggaaaatgtgcatatcgtgcgttatggaaccgtcagactattaccgctgatggaaagtcgattgtgaacgctgacacacgccgtaataatacctatctgttgacaatcaagtctttccagggattgggtatgccatgggatccttctgatcctaaagatccgtatttgccaaaacctgatgataaggatgaaccgacaaatccggaaaatccggatatcgagaaagaagagacctacatgcgtgtcgaggctaaagtgctccagtggaaccttgtctcacgtgatgttattcttgagtaatattactattaaacagttgataaattcagcaaacaatttcttacacaattttagagagggatgtggattttttcccttccctctccaataacctaaaagtttgacttcaaactattaaataatcccaacataaactatatcaaatgagatttagaagcgtacatgctgtcgcatttatcttgttatcggcttactgtcttataggatgtgattttgccgtatttgatgacttggtcagttgtccgcaaggtgtcagttttcatttttataggcaaaccccttgcgaacaatttcccaattatccgtcagatatcaggcaggtccgggtatttgcctttgatgccaatggcgtgctggtaggcgaattttccgacaagaaagtactcctttcagcggattattccttgtctgccacattacagcatactggaaaacttacatttgtcgcatggggtggcagtgacctagagtcttatgatttttcagattttcaagaaggcgttactaccaagggggaaatgcgggtcgcactgcggctgaaagacagacggactacttcagtccccggatcgctgtatgtcggtctcgcctctgtatcgctggagaaccgagaggatatggggagtgtgtacgagcgggtgactttcaatatgcgggaattgacataccggatacacttcacaatcagctttataggttcttctttcctcatggacgaggaatttgttatcaggatagaagatgacaacggtgtgtatgatttcaacggtcagatcgctctttgcgaacgctttgagtatgtaacccaagccgtacgtgacactggaggggcattgaaagcggatttcacgctgatgaaactggaagagggcaggaacgcactcgtatccctgattgataagacaaccggggagattctttatacagcaaatctggtggatgacatcattatgttccagggagatgcgggtgagccgccgtatagtctagaatgtgaccatgattttcccataaccctgaaactcaaatatgagaaggatacatggatgctggtacaagctactgttctggattggaatgtcatttcccgtcctatagaattggaaaactgatatcatgtcaggataggtttaagacaaatgctccgtgtgatatcagaaaggatttgagattattaacaaaaaacgatagataatgaaatacggaattgtgatgaggctgttgacggtggtctgcgtagcgattgtacaattgaccggatgttcgtctgatgcggaagagatggaaaaagccattccagatgttcccatccggattgtagcggaaatgaataggggggccgttacttcccgggcggcagaagcttctgcacatttatttggagaatggaaggaggactatattggtgcagaagaatacgagaaaactgtcaagcatatcctcctttttgcttacaagaacatcgggaactccttggaaaaagtccttttctattatccccaaggaacggccaatccgctggcagatgtaactggaattgaccgttttgagatgagagagatgggtggggtgaatgcaggggatttcgatattgtcctggatctggagctgactggtggtaattatacttttgttttactggtcaattgcgagtctggattgaaaaagatccgggaggaacatacaattcctgatcctaaacggctgacagagaaaaccgaaattttcacatctgacgatctaaaaggagaaaaccggaagtaccttcccatggtaggccaatgcaacttccgcgttccgtacaatacgagcggtaataatagagtaaccctttcaccctgcatacttctggaacgtatgcatgcccgtgtcgagtttattcttactacggttgataacgggggaaactacttgtctcctttattgccgttttccagagtgacgaaactctctctgaacaatgagaccagcggttattccgtccttccttccgtcggggaatacaccgccactgggaatggtgacccagatatcagaggagtcaactatatggaagatcccctattgctaccggaaaggcccagtttccatgaaggcgccaacgagggccccggagaatccgcttttgtggccaaatgtaaagagagactgcttccatatacgggagaggcacctaattatatttatgtggctccgggggtctatggtaaaggaaaagagggggcgctggccttggtcttatctatcgattatctgatggaaaacctcgataagcagtataggatcgagctctataatccggatctttccgagaatgacaagggttattacaatatccggcgtaatacgatttaccgtgtcttcgccacactgaaaggacccggaaacatggaatatgacatagttgtggacgaatggaaggatacggaggtggctattccttggtaacaaggtatgaccagtcatgccatcacgaagaaaaacagtttaaagaatagatacatatgagaatcaaacattacactttgatagtcgcttttctggcgatatctatgggaatccctctcgtgcaagggtgcagtgatcccttcgatgagtatggaaacggcgggacagaaatgcctgtcagggacggctggacgtctgtcagcatgtctgtcgaaggacttggtcttcgaaatcccctgacacggtcccttacaccggagggggagaattccacggtagcggagaggattagggtacttgtgtttgacaaggacaacaagttttcatatgaggccaaagtgacctcctatattccttccggtaatccggctgacaagaaaggcaagggtaccatgaccttgttggcgaaaaatactccttcaggcgataccagtacattcgtgatgctggccaatgtcacccggtcagctaatacagacgcagacggactggctggaaagacacgggaggaagtcatgcaacttttcactttctccatgccggacaagggggtatggaaagacggggagttgccgatgtggggtgtctcggacccggtcagggtggatcacagtgccggtgctgttcccaaacttggaactgtctatctggtccgtgccgtagcacgtgtggacgtggggcttaacttgagcaacatgtcggaaggggcctctacattcgacgagaaagccggggggattgaagggataacgctgactaaagtgtttttttataataccaatacgacgggacgggtctccccgttcgagaacgggatttactgggatgaggccaatagaaaggcgaaacagccttctattcctgatccggctccggctgtgacaggaaagattgatagaacatcttccatagtggatgagaaaatcttgttacgtgaggtatatgttccggaggcggtcaatgcgccgacggctgccacgcaaggagccaacggagaaactcttcctgagaataatacggaaaattacttgaaacgtccttatatcgttgtcggactgaccggtgcagataagagccgtcctgacaaggaaactttcttccggatagactacctgaaacgtactggagccgaggctgatgcgacatacgagtaccttcccttgttgcgtaatcaccgttatctggtgaatatcaaggctgtaggtggtccgggattcgatacggaagaggatgctaggaaaggaccggccgccaacatcatgtataatgttgtggtatggaatgagtccatgatgtctgatgtattgtatgacgggcaatatatgctgggagtcagcgctgaccatttcactttttatagggagggaggcagcctaacggcaaaagtgcagacttcttggccggaggggttcacgatagagggactgcctgcatggatcggttattctataaaaccttcggatccagataagaccgcaccgaccgatgagaaaaccgtgacctttacggtcacagaacatgtggatgcatcccgaatgtggccggaaaagccggaagatgcccaggatgcgctgaaagccgcttatgtgaaggcggggcgtatgaaatggtttcttggctttgaacagtctaaggatatcaatgtcaccttacagatttttgcggacgaggcctgcagccggccgctggagtttattgaggtcaatcagtatggcgagagctatgggcaggcagataaggtgataacgaaagacgggcagacgcttacggcagaagaggcaggtgccagggttactttctatgtaaagacagaaccgcatgatttggaacccgttttccatgctgaagctgccaatccgttcaagatagagaaagcgggtcaacttgccgggggaatatggaagtacacggtgacggctcccgacattacaggaaatacggagtatttcgataatttcaataccacttatactttgaccgtcacacatgtgggaaccggcaaaagtgcgtcggggaaactcagcctcctgcagaaggaatataatgccatccccttctttgacaaattcctgcatcagtcattgctggtatctagtaacagtatctatctgatggatggcaaacagaaacaatattatgtcaaagccaacagcgaatacaaaattgagttggtttcggctttgtctgacaacaatgctggtaatgtgatagaagactttatgcttttctatgagaaggatccttccctttcgggaaaacctgtgcctttcatagctgttgacgatatggcgtctccgcgtctttactccggtaaggcgaaattcaagatttattcccctgatggtctttttccggaaagagaatttgagttggagctggtttccggaattgtgcagcctgaagcgaatacatatatgcttaaagcgggagcaaagcaagggatctttattcctgtttcccgggtaaatactgcctatgagtattacaaaaagcttctggatcatgacgctgttttaagtgataagcagggacttcccggtagcaaagaggatttcatgttgaataagttggatgcagatgatgattggagagtcaatatcgtgtggacggacattaaagaggctggcggacataatgatatagaaaaagcgggactcagtgaattgtccgaacagggaggttccggtccgggatcatatatttatgtcaagccagggcagactccgggaaatgtgttgatagaaattaaatctggaaagatcaaggggaatccgacactctggtcctggcatatctggattgttgacaagtatccgacagtcttggatgttgcgagtcagggaggtgatggtccgaaaacggttcaattgatgtcgcatctgttgggagcatacgaaagggtccaatcacagtatagtgcagatgcatatagggaatttggtatgcaatatcaatggggcaggaaagacccgttcccggcacatgatgttcgtgtcaataaaaacttttatgacggcagtggcaagctatttgatttcctttgggaacagagaggaaatgatgtggattatggaaaaacagatgctcagcaagcgagaggggctgctcttacgatgaaacagagcatcgaacatccaaacgctatcgtctctcatcaaagtttctggctgtatgaatgtttcccgcataggtttgttagttatttcaaagaccgctgggtattcctgtatccatggaaccagccttcccagacagggaatccggaggatgtaggcgggaaaaccgtatttgacccttctccttacggattccggattatgtcgcagaaagaggctgtaactttgaggtttgcatattattatgcaagtcgttccggccttaacacaccgctgcctggaagtatttatgacggcagttttacagatggcaagtctgggggtaatgaagtcattttcgccgtggcacaagccagaagcgatactcatgcagggcgttatctgcttaattccactggaggtcctgccggttgggcgcctacttctaatacaagcgctgtttacaggcgttgcatgacttattccgtacgtccagtcgtcgatccagatgtaaaggatgattatgagaaatatttaccccaataagttatatcccgtgcagacgaaaacttgcacgggacataaaaaatgacaagaaagtttctcatatacttttgttttgagacattccggtgttttttgtataagccacatattcatgatgtggaagttgcgagagtcttgtttcgtattacttttatatagtattgggagggactcaaatatatatcatgatgaatcctattttagtgacctgtatgtaaacctttatatctaagggattgtcaaaatcagaggttgattgattaatcagcatacatcttgtatgttaaatttgtctgtttcaattaataaattgtccattttgttaaaaacagacgtgctttaatttttgttgtaataaaaaacaaaaaacatgaaattgctatatctgaatgaacatttatcttgcctgaattaccagatgaattcggacgtgggattttcttgtcagcagctggaggagaatgaggtatatcggattgataacagcaggtcatcatgtactctttttatgattgaaggggaggtgatttttgatttgggtaaatataaaggtttgcggattttacaaaaccagatggtgtttattccgcaaagcataggaacccggatgaagtctataatcggttcgagatgcatgcttttattttgggacaagaatgtgagtgtgtgcgacaaattgtttttgggctcgttgtctgtcagaggtaaggagcaaacggctgataattttattcttcccatcaggaaacctcttgttaaagtactgaattctgttggaacgtatctggaggcaaggctgctttgcaaacatatgcatttgctgaaacagcaggagctgctcttggtgctgaagggcttctatacaaagaaagaactatcggcgtttttttccgcatcgactggtattcggcggcattttgagaaatttgttatggagaactataagagggtgaactctgtcaaggaattcgctgatttatattatgtttccgagcgttccttcagcagaaaatttcactccagcttcggggaaagtccctataaatggatgcagaggaaaaaggcagaacagatgttggacatgattagtgatccggaactttcctttcaggaaatatccgataagttaggttttagctcgccctcccagtttacggcatactgccggagaatatacgggatatccccttccaagttgagagaaaaaaataaagaataaacagatttttataattgcattataacggaggaattatggaatattcgaatgcagatctgtccgttgggcaaacagatctttcttatgtggaattaccgaagatctgtatatctgtctacaaggagattgttaaggaaatggcagaagtgataaaggatgctcggattcgagatattttttactccctttctatcgggggagacgtatcggctgtctccaggagaacaaatatttctcccagaaatctggcatatatgtataagaaagcgggtaggcaggttcgcttggaatggaagccctattctgaatggaaaaaggaattggaccgtttatatatcagatgccggaattatgaggctttgctggcacattcccaagaggatgctggacagaatttaaagaatgtagtgatagttgtaagggaacaggatgttccatcggaatatgtgcacctgctggctacacctttaggaaatctggatataaatttcaggactttacgtgcacttagaaaatacaatatctgccaacttgaggatcttttacggtttataaaatataatgggtttgatgcgctgtgcagacttcctggtatgggaaccaaatccgtaggacagttgtataaaattttaaaagagaaaggtattttggaagataaggagacttgcactctatttccctatctttttgtgtaggatatatgggaaataagatattcatgcttgaaaagaatggatattctatcaatcaccgtttatcagaattggaacagacggtagctaattattcaaagaagaatgattcctttgtgtgtacctcgttgctgttggttgaagggtatcttcttcaacgtccagattttcgattcttacacattcgccacgggtttgatcaagtttgttaaagagttttttgttcgcattgacaactacattgataaggttcatattgagtaaacggtaaccgggagtaacggccaccatctacacgtaacgtattactccgcagttccagcctaatgtttatacaacacgcgcaatactatcattgatgaaatttttattggctatgtactgcgctcctcatcttttatgcaaattaagtataacaacctctatctcattgtctttttcggtgtccgttttgcccagccttcttcactgaagtcaggttctgggttcttgaagtcattgctgccttgaaagaactgtttccaatcgtcttttttgccacgggctttggtataaccgcgttcctcgcggctgggcttgcctttcttcttgtcgtttgcagggttttcggctctgtctctacgtctgctggcagcatcgttccgtttgccgtcttccttgttgctgcgcttcttgccgtcggaatctttttttccatagcttccggctgtacccgtgcgtctgcctttcgggacattcttaccttcgtctccggcaatctctacagatactttgcgaccgttccagttggtacggttcaaggctttcattacattgttggcttctttttcctctacttcgaagaaagagaatttctgcatcaagtcgatgcgtcctagctcaatgcgtccacgggtgtttttgttcagcaggctgataagctcactgggaaaaaagttgtccattttgcccagatttatgaataggcgtttgtagcccggttcggcttgatgattgccactgcttcggtgttcactccgctcaccgtttcttgttccgcgttcactgccggttgctgtctctatctcttcacggtcgcggtagtagtctagaaaacggttgaattcatgcgaaaccatccgcttaatcaaatcttccttacttagccagtccagcttgcggtagatatcagtcataaagtcagcgatttcctcctcgtttactttcactttttcaaggtcgtctatcactttgagcagttgtttttcgcatatctgtttgccggtaggcatttcgcctgcaatgaatttcttgccgatgatgcgctcaatctcgcgcatcttgcctttctcgcgcaggttgataatggcgatggaagtcccggtttttccagcacgtcccgtacggccgctgcggtgggtataactttcggtgtcatcgggcaatccgtagttgatgacgtgggttaggtcgtccacatcgaggccgcgtgcggcaacgtccgtggcaaccagcagttgtaggttgcggatgcggaacttctgcatcacggcgtcacgctgcgcttgactcagttcgccgtgcagcgagtcggcattatagccttcctgcatcaacttgtcagctatttcctgcgtttctttgcgggtacggcagaagatgatgccgtatatctgcggatagtagtccacaatacgcttcagggcagcatacttgtctttggcatgtacacagaagactacgtgtttcacgttgctggtgctttcatttttgcgcccgatggtgatttctttggcatcgcgcaggtacttcttggaaatgcgtgcgatttccgggctcatggtagcggagaacagcaaggtattgcgctcttgcggaacgtcggcaagaatagcgttgatgctgtccgtgaatcccatgttcagcatttcgtccgcttcgtccataaccacgttctgtatggtggcgagggacacggttttgcgttccatcagatccagcagtcgtcctggtgtggctacgatgatgtgtacaccccgtttcagggcacgtatctggctttcaatggacgaaccgccatatacgggcaatacccgtaagccatcaatgtatttggagtaatcgttcaaatcgccggctatctgcaaacaaagttcacgggtagggcagagaataagtgattggggaattcggttgttgacgttaatcttctgtatgagcggcagaccgaacgctgcggtttttcctgttccagtttgtgccagtgctactacatcattgttttctcctaaaaggtatggaattacttcctcttgtaccggcatgggctgctcgtaacccatttcttcgatggcgcggcgtatctccggcgacacaccgagctcttcaaatgtcttcattaaatcttttgtatatctttatatttcggacgcaaagatagtgcttttcaatggatatttgataattgatggttgataattatgtaattacatgataaaatcgttttttattgactactgattatccattatgcattgtcaattatctactaaaagaatgtcttgtagtctctttctttcttctttcgtcaggccgatgcctctttgcaggtaggtgtcggtatctccataccttcgttccatttcttcgatggcggcatttaggaaatctgcgcgtgctgagaatatggtggtgatagcctcttgcgaacgtgccggaagctggtaagcgtaccgagaggcagccgggatgttgaagtagtcgttgctgaggcggtagtcttccatgatgatgtcttcgcccactccaagggaggcaagcacaagcgccgatacaatgcctgtgcgccctttgcctgaagagcaatggattatgaggggataattgttcttatccagtaggatatcgaaaatctgacggtattctttagtatagttgctgatgagctcgcggttcattcgctccactatccggtggacggtatcactcttgattgtccgctcctgcacacctttcagaatatgctccatatcaccagtaggaatagggatgtgcaccactttgaattcttgctgcaaggggctttgtctgtgtgcttcatcgaatgagcgcaggtcgatgatagtccttattcctatattcttgagctccttgcgcgagcacggttccaatttgtctatttcggcagagcgatatagcatgccccaatgtactttcttttgggtaggataggacgtatagcctcccaagtcgcggaagttctgtatgccggggatattgatgttgcgggtggcaatctttacccggtatttgtcaccgaatacaagcatgtagtagtatcgctgtgtagggtcggtagtgatgacggtcatcttcagatcggagatgttggcaatggcaataggaacgtcttcggggatgtcctccgggttagtcgaggcatatactttaacattccctttgataagaggggccatttcccatttcacaatgcagttgcccacattgttttcttcgcatacaacggaaatgtgaggggcagtgccgctacaagaagggagcagcactgccaaaacaagcaagttcaataaattcctatacataattcgtaacctctctgatgtcgttaatcacaaatatatgtaatttatccacagagggtaacgtcaatgtcaggcttttatatttcttttttgaactttaaaattatctgtgcttctctacaaattcctttgaaacggagttgttgaaacttttgcatacctcagcggcaaactcaatgccgcattggataacttggtcccaagtagcttcgtccatggtatcgaggtccttgtagcgtacattatgtttcagcagcccgaagatgatgcctgcgttgaaattatctcctgcgccgatggtactgaccgcttctaacggaggaatggaatattccttggaaatcgtgtcggtgcgcaatgatacctgctctgcgccggcagtacagaggaagttacggcagtagaactttactttgtctttgtatatcttgtcagcctcctgcaggccccacatatagaagaaatcctcttgcgagccgcgtacaatgttggcgtattctagattttcgatgatggtgggagccagcttgatggcctcctctttatgggacgaacgaaaattggggtcgtaatagataatggcatgcatgtcgtgtgcgcgttccagcagttctaatactttgtcgcgcaatacggggtttaaggcataataagaccctattataacgatgtcgtcctcttgaatttgtggatactctatatctaatcgttgtttggggtaatctttatagaagatgtattccgcatcactccggtcgttaaggaaagcgagtgatacgggggatttcccgtcagggaagacattaacatggtctgtggggatattgttctcgcgcatgaagttgagtatgatattgcccacgtggtcattgcctgtttcactgataaagcaaatgggaacgccgatacgtcccagcgagacgatgccgttgaatactgaaccgcctgggacagctgctgtgggctgttcgccacggaatatgatgtctagtatggtttctccgatacctattactttacgcatagcgatcttgatttttctccgaggtaaccgccgtgatggcgcttggagtagtcttcaatggtgaatccagtttctttcatggtctgtacaaccaaaatgtcaccgatgacggtcatggcagtggttgaagtcgtgggcgtcatgcccaatacgcatacttcttgggggttcccggtgctgaggcatacatcggattcgtgtgccagggggctatcagggtttccggtgatgacgataaacttcagttccggacttaggttatgtgccaactgtgtcagctccacgatttcacgagttttgcccgaattggagatgagtagcaacagatcattcccctgaaggatgccgaggtcaccgtgctgtgcttcgctggggtgcaggaaaacggacggaataccggtggagcagaaggtagtagcgatgttcatggctatttgtccggccttgcccatacccgaagttaccagtttcccttttttgcggtgcacttgttctacgatgagttctacagctctttcataagcgtccgtcactggaatgttcagtacggcttgtgcctctttctgcaaaagctcttgaatggatgcaatcatactcttaatgtatttaatgtgctaatatgctaatgtgctaattggctgcgctgtgatgccgcatggtcattggcatattagcacattatagcaatatgcaaatatctgcaattttctataaacggcaataagttttattgtatttttgtcgcctcaaatagtttgaaacgtcagaatgaagaagttaaaagagaatttaccgtcggctttcaaccaacatatcttgtccaacggcttgcgcatcattcatgaaccttcagtctccaaggtggcttattgtggttttgctgtagatgcgggtacgcgcgatgagcttgaaaacgagcaaggtatggcgcattttgtggagcaccttatatttaaaggtaccgccaagcgtaaggcatggcatatcctgaaccgtatggagaatgtgggcggagaccttaacgcctacaccaacaaggaagagacggtgatttactctgctttcctgaccgagcatttcggccgtgccttcgaattgttaacggatattgtattccactccactttcccgcaacgcgaaatcgagaaggagacggaggtgattatcgacgagatacaatcctacgaagacaacccttccgagctcatcttcgatgatttcgaagacttgatattcagagggcatcccctgggacgcaacattctgggcaatcccgggcaactgaagctgtttcgcagtgaggatgccgctgcattcacttctcgcttctaccatcccggcaatatggtcttttttgttctgggcaatctggactttaggcaggtggtgcgctgggcggaaaaactcctcgcggatatacctgccatggcagtggacaaccgccgtacgccaccgcccctctatgtacccgagcatcttgtagtgcataaggatactcaccaggcacatgtcatgattggcagccggggatataatgcatacgatgacaagcgcaccgcactttacctgctgaacaatgttttgggtggcccgggcatgaacagccgattgaacgtttctctccgtgaacgtcgtgggctggtctataacgtagaatccaacttgacttcctataccgatacgggaactttctgcatctacttcggttgcgaccctgcagatttggactactgcacccgcctggtatataaggaattgaaacgcttgcgtgatgtccggatgacttcctcgcagcttgcggctgccaagaagcaacttatcggacaaatcggtgtagcttcggataataatgagaacaatgcgttgggcatgggcaagactttcctgcattataataaatgcgaaacttccgaagccgtgttccatcgcattgaacagctcacttcggaagctctgttggaggtggcaaacgagatgtttgccgaggactatctttcgacgctcatttatcgctgatcgctttttttatttgaaaacctgcaacataggacgtcttatccatacttgtggctgtttcagtccgaggatgtggacaatggtggaggcaacgtcatactgcatcatgctttcgtggaattcgcctcctttcttaatgttctttccggagcctgcatttcctgcatggtcttgttgccatggccgtttttaatgcctccgtggttggcagtaacgatgaagatggtaggaaatatgctatgatggttcaatacacgtgactgaagttcgggagtcttagagcctcattgtaggcaccccagccatcaagaccgatgaaaactacgtgtttggctcttcacttagcattgcagggaacagaaaagaggtataccgctgtcggagtgatgagtaatgtaaaagtcagtttcttcatgttttctttagtttttatttattcttttccagtcgttgcatgctgaattcacagccgcaatactgctggttatagaaatcatactctttcagcagttggttgcgtcgctcctggagcccgcccttccgccaattctgttcccagaagagggtgcccggatagagtgcggcggcacggcgtcctgcttcattgatttgttccaggcttttccagcgcgaagaggcaagggtggtagtgaatacggagaaaccatgctcggaagcgtagcgggctgtttctgtcaggcgcagagtgaagcacttcaggcagcggctgccgcgttccggttcatgctccaggccctgcatggtatgtaaccagtgtgcataatcatagtctgcatcgatgaaatcgatgtttttggaggttacgaaacggatagcctcgtttttccttgtctcatattctgcctgcggatagatgttgggattgcagtagaatacggtcgggcgtatgccgttggccagcatgcactcgatgatggcggaagaacaaggtgcgcagcacgaatgcagcagcaccttgttgtcaccgttgggtgtctgaactttcaacattatactttcagtttaatcttgcctttcaccagcaggccggtcagccccacaatgacaagcgagaacacgagggacttgagcagtcccggtacaccgcttcccaatgcctcgggatagtgcagatgcagcagttgctggacagcataccagatgtaagggataatatagcaggtcagcgttgccgtacctgcaggtttgatgatatcgaaccagttggtcttgcctttcacgtccgtcagccagtagaagaaaccgaacagcgggaagaacatggctaggcagtagaacaaccatgtcggcgtggcttgtattttggatataatccagaacgggtgtgagacgagggcaaggacaagcattcctacgccgagggcacaaagcatgccgatgaatcgtcccggccgttcccggtcggcataacgctgcatgagcagggaggtcaatacgccggacataccgaaggcatgcagcgtccagtcactcgggataaagggaagcaggataatccggctgccgtactctccaggtatcaagtctgaatggctgactacggcaagcaatacgaccacgaaccaggcaatggcattcttccgcaggctttcccgggtgaacagatagatgcctgcacataccgcatacgtccagccgataagtccgaggatgccccaccagcttatctggaacggtttcccgttcatgtccttgtagatgacgaggaaggcgagcagcagcacgcctgctgttttcattgcggtgaaaagggtctttttcgttccttccgctttgggatataccccccaggtgaggaagaaaccgatgaccatcaggatggaaaaccattggtgcgatagaccgccttcgatgcctccgctgttcagtgaaaacagtcccatggcaatcagcgccactgtccgccagaagatatgggccacgacttgcagggtgttgtctccctttttgtaccggttttgtatggcaaaggatacggacatgcccatacagaaaaggaaagcggggaagatggtgtcggagaatcccatcatgtcttcgtccatcctagcatgcatcagccagtgggggacgtttttcagtccgggaatgtcgttgacaaagagcatgaagaacatggtgagtgcgcggaatacgtctaccgcggcaatccgttggggtgttaagcttttcatgatagataatttgtttgggggtttagaacgcaaatataggaaactattttttccgatgctactgctttgcaggatttcttgctatatttgcatgaactttatggtcatggaaaggagattgttcactttttgttttcttgccgtcgtggtatggcaaagtgtggtttttgctgccggcacgccctcttttactgcgctgacgtcctctttggatgaggctatcgaggcgcaccggcactatgtcgccgtgcgtgaaggacgcattgcccggctgaagcgccaagtgctggataccgataccgccaatatctctttttttcgatggaatggggaaatctataaggagtataagacatatatctgcgattcggccatccattatcttcgtgtcaatctggattgggcagagcgttatggccggcaggatgcggtactcgaaacaaggctggagcttgcccacctgatggcttcggcaggtatgtacgaggaggctgccgaactcttgaggcagacggacaaagcttcccttccctcccatctgctgccggactattacaatgcctgtcataaactttacacagaactgagtttctatacgctggacgattctttcaagaagcattatcaggctttggctacccattatgacgattctttgatgcaggtacttctgccttcatcctccctctacctggaacgaagagaggcgcgggaggccgctgcaggccatccggacgaagccttgagcatcaatgatacgcgtctggcacatgccaagcccaatactcccgaatatgcgctggtgacctatcagcgctcattgctctaccgacggctcgggaaccgggaggaggagaagcgctatctggctttgtcggcactgaccgatattcgcctgagcatcacagaccatgcctcactctggaacctggcggaacttctttatgaggaaggggatgtggagcatgcctaccgttacatccgtttctcgtgggacgaaaccaaccgatacaacgcccgtagccgcagcctccagactgccggcatcctttcactgatagacctcacttatcaggccatgcgtgagaagcagaatgaccggctccggctgtacctctggctcatcagcgctttgattgtgctgttggtggtggcagtgggctttatctaccggcagatgcagcgactctctgccgcacggaacaagctggagcatgccaacgagcaactgcaactctcaaacaacatcaaggaggagtatgtgggccgtttcatgaatctctgctccgtttatatcaaccggctggatacctaccggcggatggtcaacaagaaaatctctgccgggcagatggaagagctgctgaagatggtgcgttcccgcgaggtgctggacaccggactgaaggaactctatgataactttgatactgccttcttgcaccttttccccgattttgtcgataaattcaatgacttgctgcagcccgaagaacgcatcgtgctccgtaaaggcgagttgctgaatacggaactccgcattttcgccttgattcgtctgggcatcgacgacagttcgcagattgcagaattcctccgttattccgtaaacaccatctataattaccgtgccaaagtgaagaacaaggcccgcatttcgcgcgaggactttgaaatacggctgatgcagatacgctgacaatacgtcaaaccggctttttgaatccactttctgcctttctcttcttttgcttatatttctgattattagttgtttgtttgttcatgcttcttcactccttccacctattcccgattcgccggtacgaggtgttcttatctttcctaactttggggaagcaaaagcgaatatcgcaactgatactataaccaaaattattgccatgaaacatttattagcgacaaacattttcatcgccttgctgtctttgggccttgcgggatgcggtgagaaacaagcgacaaaagaagtaacttcggatgcattcgtaaccattcagggtcaggacttgataaagcccgacggtaccaaactcttcatcatgggtaccaacctgggcaactggctgaatccggaaggatacatgttcaagttcaacaagaccaattccggccgtttcatcaacgagatgttctgccagttggtgggaccggactttacggccgacttctggaaagtattcaaggacaattatgtaacgcgcgaggacatccgcttcatcaaggagcagggtgccaacaccatccgcctgcctttccattacaaactgtttacggacgaggactatatggggctgactgccgaccaagacggctttgcccgcgtggacagcctggtagagtggtgccgcgaatcggacttgtacctcatcctcgacatgcacgacgcccccggcggacagacgggcgacaacatcgacgacagctacggctatccctggctgttcgacagcgaagtcagccagcaactctactgtgacatctggcgccggatagccgaccgctacaagaacgaaccggtcatcctcggttacgaactcttcaacgagcccattgccccttacttcgagaacatggaggaactcaacggcaagctggaagatgtatacaagaaaggtgtagccgccatccgcgaggtggacagcaaccacatcatcctgctgggcggtgcgcaatggaacggtaatttcaagcctttcaaggactccaagttcgacgacaagataatgtacacctgccaccgttacggaggcgaacctacccaagctgccatccagacgattatcaacttccgcgacagtgtgaacctgcccatgtacatgggtgagataggccacaatacggacgaatggcaggccgctttctgccagacgatgcgcgagaacaacatcggctataccttctggccctacaagaagatggacggttcttctttcgtcggcatcactccgccggagaactgggcaaacatcgtgtatttctccgaagcaccgcgtgccacgtacaaggaaatccgtgaggcacgtcccgcgcaggccatgtcccgcaaggcgatgatggactttatcgaggcatgcaaactgaagaattgtgtggttcaggagggttatatccggtcattgggaatgaagtagcgggtattgcctcgctgcaaacagtacgtatcaagtcccagaggatgagatgccgggacttagcatgaaagaggtagggactgagctgtacacaccataggactgagaacccaaaacatccggatgttatagatattcactatacggctgtaaggatttcagttcctatgtgtgtagggataagtcatattcccttgtctgctggggattgtcaatagtacggactgattatgagtacttacttaaattatataacaacttaaattgtacaacaatgaaaaaagtattattcggtttggttctggttgctgtcgcgctgcctctttcagcccagcagaagcccgtctatctggacgcaagcaaacctattgaagaaagagtggaagacgctttgagccgtctgaccctggaagagaaagtgaagttgactcatgcgcaaagcaagttcagcagtgcgggtgtaccccgtctgggcattcccgatgtatggacggatgacggccctcacggtatacgtcccgatgtgttgtgggacgagtgggaacaagccggatgcaccaatgactcctgtgtggctttccctgccttgacttgtctggcagcaacctggaaccccgaaatgtctctcctttacggacagactatcggtgaagaggcgcgctaccgcaacaaatcggtcttgctgggccctggtgtcaatatctaccgtacaccgctcaacggacgtaactttgagtatatgggtgaggacccttatctggccggaaagatggtagtgccctatatccggggcgtgcagcagaatggtgtggctgcctgcgtgaaacactttgccttgaacaaccacgaagtgaaccgtcacaccaccaatgtcatcgtggacgaccgcgccctttatgaaatctatctgcctgccttcaagatggctgtgcaggaaggtggagcgtggagcatcatgggtgcctacaacctttacaaaggccaacatctttgccacaaccaatacacattaaacgatatattgaagggcgaatggggattcgacggcgtagtcatttccgactggggaggaacgcacgatactcggcaagccattaccaatgggctggatatggaattcggcagttggactaacggactttcaaatggtgccagcaatgcatacgacaattattatctggcgaatccctacctgaacctcatacgcgaaggtaaggtcggtactaaggagctggacgacaaggtacgccgcattctgcgccttatcttccgtacggtgatgaatcccgaccgtccgtggggaagtatgctttctccggagcattacgaggctgcccgccgcatcggcgaggagggcatcgtactgttgcagaacaaaggcaatgtgctcccgatagatttggaccagactaaaaagattctggtagtgggcgaaaatgctatcaagatgatgactgtaggtggtggcagttcttcgctgaaggtgcagcgtgagctttctccattggacggtatcaagcagcgtgtggctggcaaggctgaagtggtgtatgctcgtggctacgtgggcgatgcaagcggtgagtataatggtgtggtgactggacagaacctgaaggatgaccgcactcccgaagaactgatagccgaagccgtgaaagaagcccaggatgccgattatgtaatcttcatcggcggtttgaacaaaagcaacggccaggactgtgaggattcagaccgtgaaggtctgggtttgtcttacggacaagatgctgttatctctgcactggcaaagacaaacaagaatctgattgttgtcaacatttccggcaatgccattgccatgccgtgggtgaacgaagtgcctgctatcgttcaggactggtatctgggttccgaagccggcagtgctctcgccgctatccttatgggggatgtgaatcccagtggcaagcttccgtttaccttccccgtgaagttggaggattgcccggcccacagcctgggtgaatataccggcaagcggagcaaggacatcatcgacatcaaatacaatgaaagtatttttgtaggttaccgttgggccgataagcagaagaaggtgaaaccgttgttccccttcggccacggtttgagctataccactttcgagtatggcaagcccacagccgacagcaagaccatgcaggccgacggtacgctgaccgtgaaggtttctgtaaagaataccggagcgcgcgaagggcaggaagttgtccaactgtacatcagtgacaagaagtcctctctgcctcgtcccgtcaaggaactgaaaggtttccaaaaggtgaaactggctccgggcgaaacaaaggaagtcacatttaccattgataaggaggctcttagcttcttcgatgacacccagcacgcttgggtggccgagccgggtaagttcgaggctgtcatagcagcttcggcagccgatgtgaagggaacagttccttttgaattgaaatgatgtagggaaataaagtttccttttaggttattatcaaagatagtgtagatggagggtgtggccgtgaggttgcaccctttctttgtactctttacaagccaatatgttttcttatatttctgagtttcttcgggttggctaaagaagatgcagatatgctggatgttagagtcaaagcagtgatgttttgtagtaatgggtgagtttttaccgccgtgtttaggcagattttcatcttttatatttatttttgcagaaatcaatgtttaataaaaactatcatgaagaagtatttagcagaaatgatcgggacaatggttcttgtcctgatgggatgtggtagtgctgtctttgccggaagtgcggcgggggcggttagtgcaggtgtcggaacgctgggagtggcttttgctttcggcttgtccgttgtggcgatggcatacgctatcggaggaatctcgggctgtcatattaatcctgccattaccctgggcgttctgttgtccggcaggatgagcgggaaagatgcagccatgtatatggtgtttcaggttatcggggcggttatcggttctgccattctttatgcattggtgtctacgggcgctcatggtggtcctacggctaccggttccaatgggtttgctgacggaatgatgttgcaggcattcattgcagaggctgtgttcacgtttatctttgtgctggttgtgttaggttctactgattccgagaagggggcgggtaatcttgcaggattggccattggtcttacgttggtattagtgcacattgtttgtattcctgttacgggaacttctgtcaatcctgcccgtagcatcggtccggcactgttccagggtggcgaggctctctctcagttgtggctgttcattgtagctccgtttgtgggtgctgcgctgagtgccgttgtatggaaagtgcttgctgcaaaagaaggtaaataaatgtcggcagacagtgccttaagaagaggcggctgatggcagaaaacttataaagggaagccctccgtccgaaactttgaagtttcggacggagggcttcctgttctttccttatgcttgctatatcttgtgccttattcgtacagcgatttggctatacccatttccagtccacgaagctctgccagtccgcgcagacggccgatacaggaatagccgggattggttttcttcttcaagtcgtctaccatctggtgtccgtggtcgggtcgcatcgggatagagacaccacggcgttgttgcagttcaaggaaggctttcatcacgtgatacatgtccacgtctccttccaggtggttggcttcgtagaaattgccttcggcgtcgcgttgtgtactgcgcagatggacaaagttgatgcggtcggcaaattgctgcatgatgactgcacaatcgttggcactgcttacaccgagtgagccggtgcagaggcaaaggccgttgctcttgttgggaacagcgtcaatcagtgcctggaaatcggcagcacagctcatgatgcgtggcaggccgaggatggagcacggtgggtcgtctggatggataacgagcatgacacctgcttcgtcggctaccggagtgatttcttgcaggaaatagatcaggttggcacgcaggcgttccggagtgatgcctttgtagcggtccagttcctgctggaactgttccagggtgaagctttcttctgaaccgggaagtccggcaatcatgttgcgtacaagcagttgtttgtctgcctccgtcatctgttcgaagcgggtacgggccttggtcttttcctcgtcagtgtattcggcttctgcaccggggcgatgtagcaggaagaggtcgaaggcgatgaaggcggcacgttcaaagcggagggcacgactgccgtcaggtagttcgtaggcgaggtcggtacgtgtccagtccagtacgggcataaagttgtaggtgacaatgtgaatgccgcatttgcccaggttacgcaagctctctttatagttgtcgatatacttctggaagtctccggtttgggtcttgatatgttcgtgtacgggtacactttctactacagaccagcgcagaccgacggcttcaatcatttctttccgtttcttgatttcctctactgtccatatttccccgtttggaatatgatgcaaggcgtttacaatgccggtagccccggcttgtttgatgtcccaaaggcttaccgggtcgttgggaccgtaccagcgccaggtttgttcacaaagaatcatgttatttattgtttgatgatttgcaatttactatttacatcgcgaatgcgttgaaccctccgtccactacagccaccgtaccggtgacaaagctggaagcatcgctgatgaggtattggatggttccgcaaagctcttctgcacggcccatacgtccgaagggagtttggcggatcacatcttgcccacgttccgtgtagcttccatccgggttcgtcagcagggcacggttctgctctgtgaggaaaaatccgggtgcgatggcatttacacgaataccttcgccaaactttttggcaacttctgtagccatgaaagctgtgaaattggagataccggcttttgcggcagcatatccggctacgcgcgtcatggggcggaaagcagccatgctggagaagttgacaatagcgcctgccttctgctccaccattggtttgaggaagacttgtgtaggcagtacggtaccggtcaggtttaattccagcacccgttggaattcttctatcttcaaatcgaagaatgtacccgtaggcgcgatggtggcacccggcatatttccaccggctgcattcagcagggcatctatgcgtccataggttttcagaatatcagccaggttctgttccagcagttcacggttcgtcacgtcggttgtcaggaacatggcttctccaccgtttgccttgatttctctggcaatggcgtcccctgtttctgccttgcgtcctaaaacaacaacctttgcaccttcttctgccagatgaaaggcgatggctttccccaatactcccgttccaccggttataaccactactttgtctttgatgtcaaataagtttttcatgattcattcatttaaaattacgttgtgttttatttgattaacattgcaaaaatacggaataatctgttgcactgcatttacaatcgtacagaaaatatgtgcttattgtttaggtgatggacttctgtaatatcaataaactctccggtcccatattgaacagcaggtctatgatgctcaagttgggcagaaacccgagtctctcttgaaacacctgataataaggttgtggtgagaattctgtatcttccagggcaaaatcctttttcggatgaatgcgttcgcggaaatctgtctcatgcggagcaaactcagtccggtatccggtagtacgtgtcatatccggttgcaagtctatcaaggaacagacgaggtggcaaagttcttcgttgaaatcggctaaaaattcatatttctgttcatagaagggacggaagtcatccttgtagtattcgaagaagggagtgtggttataggcagattctatggcattccagtgcagatgcctccagttaccgtggtctgaaatacgtatatcgcgcatcgggcatttcagggtgctcggtttgacggtggggatggaaagggccagttcaccgtccggtgcagcaatggtacaacggttccggtaagtctgcttcatatagtggtcatgctgttcgatgaatactttatcgtatgccagtagtttggtataatattctatgggagccaaataggcggaagaaagaaaaactgttttcatcagtatatttacgattagatgatttgcgatttacgattgaagttactgttcattgtttgtattttcatttttattctttcatttgtttgtcattccacttttttccatatcctgccccatcggtaaccgctgaaaggtcctgttcccttttctttggagaaccagatgacagacgccttgcctatgatgtggtcttcggggacgaaaccgaaaaggcgggagtccgaaagattgatggcattgttggcacctacccagtagtagtctttggtaaaatggcagtgctgcacgggcttgccttccacataaagggtgtcgttcttgatttcggcctgtttcttttcgtgaagtaccagggtattccgcagcaaagtcttgttccacggatatacgcgtacggttttgcctttgccggggattatcagaggtttcaacatctccatggagtcttccttgacaatcggttctatccagcaattcccgttcatggcttgttccagcaagtagtgttcatagcggctgaaactacgtatattctttattgagtcctgtcccaatagttggttgggagcgatggaaaggatggaaagcaatgaatccaactgtcgttcccgttgcctggggtaagaataaagaaacttctggtcgggtgcattcttttcggaaggaatcactgaaaaaagcgaatctatcagcaaggtatctccgggagtaccgatgcaacggctgataaagacttcccgtcggtcgatcacgggttctgaaagattggcaggattgttgaatacaagaatatcctctttctgcaccggactgtccgcccagcgatgatatccccataacttcataaaaggaagtcgtagaccgtagctccacttgtttacaagaatacgttcaccctgatacagtgagttctccataccggaagaagggataagataggaagttgccacacaaccccgaagcagcactacgacgagtgccactccaacgattgtaattgctatcttccacccttttttcatttaatgttgtccacccacttgaatatccggttccagcgtatcttgccatcaaaccagctgcggtctttgtccagtgacaaccatactacgataggctttcctacgacatggtcttccggcacaaaaccccagtatcgggagtcggcggacttgtcgcggttgtcgcccatcatccagtagtagtccatattgaaagtataggagtcggtcttttcaccgttgatgtagatgccgtcttccttgacttccagtttgttgccttcataggcaacgatgcagcgttcgtagatgggcaggttatcctcggtcagcttgatggtggcgcctttggcaggaatccagattgggccgtagttgttgcggtcccattgggtgtaaaggttcagcggatacatctgtcccgagaattctcccggttcgatgataatactactgatgagtttcttgttgcccgaaagggtctcgtacatctttttagtgagcggaagatgatagaccggtgccagcctgccttgggcatcccggcggtccaatcccatttcaatcagattctcttcccagcccagaccgtcggtcatcagtgtctggtcctctttgctgatgcccagttcacggaacatatcatcggtgatatagggccccgttgtttgtacaaagtagttgaactgcatttctgtagggttctcgatagctttgccgtcgatgtatacttgtcccttcttgatttgcaatgtatcgccgggtaggcctacgcaacgttttacatagttttcacgacggtcgacgggacgtatgacaatgtcaccgtacattctcggattggaacggatgaggttacgtccggcattgtagtacaaatcatagacggtacgttgctgtttgcgtgtcagactgtccatattcactttgttgggatacacgcgttttccttcttcgtaagcaagggtatagaaatctgtctgctggaagttggtggctaccgtgtcgcctgccgggaagttgaacaccacaatgtcgttcagtttcactttgccgaagcccggtacacgtttatatttccattggggccattcgatgtacgatttggtgttgaataccggcagtgtatgttgtgccagcggcatggaaagcggcgtattcggtacgcgcgggccataactcatcttgctgacgtaaaggaaatcgcctaccaacaaggatttctccaatgaggaagacggtatctgataattctggaacacatagatatttacgaagtagacggctaccagcgcaaatacgatggcatccacccaactcatgatgctgcgtacggcaggattctccgatttcttccagaacccccagggtatcttcttactgatgtagatgtcaaaaatgaaaggtagtacaatcagccccagccagctttttacccaaaccagaaaggcaaggtagagcagggtgactatactgaatttaatccattgggtgcgtgttgcttttctcatgatgtcttagtcttttaaaaatggaaacaagtcactcattcccaaagcaccttcgtgcttggcggtatattcggcagcaaggacagctcccaaggcaaatcccctgcgattcttggcatcgtgggtgatggtgatgctgtcggcttcggagtcgtagcggatgctgtggatgcccggtacttctccttcgcggatagaacttatgggcagctcattggctgcacattccgtagagcccgagacagtcccgtcgggagcctggaaagttccttctacccatttgtccttacggtcgagattctccagaataccttcggcaagcgtgatggccgtaccgctcggagcgtccatcttgtggatgtggtgcgtttcgctcattgtcacatcataggcagggaactggttcattatctttgcgaggtacttgttgacagcagagaatatgcttactcccaagctgaagttggacgaccagaacagtgttttgccaccttcggtgcaaagcttcttcacttcgtctccatgttccgccatccatcccgtactgccggataccaatttgactccggcctggaatgccttcatatagttattgtatgcaaccatgggattggtgaactctatggcaacgtcggcgctcttgaaggctgccgattcaaagtcttcctgattgtcgacatcgatgatgcttacaatttcgtgtccgcggccaagggctattttctcgatttccttgcccatttttccgtagccgattaatgcgattttcattgtttctatctgtttttatttagtttatcaacaaactataggtcgcaaagataatctttttcttacatttgtactcaacattaacgtcttgttaacatggaacaactactgcattatgtttggaagcacaaaatatttcctttgtcagcactccaaacaacctccggccggccggtagaagtgatagatcccggtttgccgaacatgaatgcaggccccgatttctttaatgccaaactgaaaatagacggtacgctttgggtgggcaacgtcgaagtgcatacgcaggcatcagagtggctgctccataggcacgactgtgacaaggcgtatgatactgtcattctgcatgtagtgggcgaatcgaattgtgatgtgtaccgcacgaacggtgagctggttccccagatggtgctcacctgccccgacactgtccgtttgcgctatgaagagcttcggcagacagagatttatcctccctgttattccatccttgcctcccttccgaagctgaccgtccactcctggctgtccgctttgcaggtagagcgttttgagcagaaagcacatgtcatatcccagcggctcgaacgctgcaatcatcattgggaggatgttttcttcattactcttgctcgtaacttcggcttcgggctgaatggggatgctttcgaggcatgggcaaaccgccttccattccgcgccgtagacaagcatcgggacagtctgtttcaagtggaggctttcttcctggggcaggcaggcctgctggaggaggtcccagcggaggcggatgattattatttgaaacttcagaaagaattccgctacctgcaacgcaagttcgagctgccagctcccatgtccgttgagcagtggcgatttctgcgtcttcgtcccgataactttccgcatgtacgtctggcgcagcttgccagtctatatcataaggagcaggcactcttctcacgtatcatggaggcggaaacgctggaagcggtgaagaagatactggctgccaatacttccgtgtattgggaagagcacttcaatttcagaaaagtttcaccccggagggaaaagcgggtaggggacggtgctttgaatctgattgctatcaatacggtcatcccgtttctttatgcatacggcctgcacaaggccgatgacgttttgtgtgaccgtgccacccgtttccttgaatccttgaaggccgaaaacaatcacgtgacccgtctttgggatggtgccggtttgccggtatctaccgctgccgactcgcaggcattgctccaacttcaaaaggaatattgtgacaggaaagactgcttgcgttgtcggtttggttacgagtatttgcggcgtagatgataataattatcgcctcatggccttagcattttatcacttttatattatctttgtgcgttgaaaaataatccgagtatatgaaggctatccgctttgttttttgtctgtttgcggcactcatgctgacgactttcaatggtctggctgccgaagaggaggatttcaagacattcctccagaaatttacgtccagtgcctcattccagtattcccgaatcaagtttcctttgaagtctcccatcgtccttttgaaggatgacggcgagacggaacagacttttcccttcacgcgcgagaagtgggcattgctggacgaggaaacgctgaaggaaggacgtactaccgaagaggagggaggtacctatatttctcactttactgtcaatgagcctgcccataaggagttcgaagcaggctatgatgaatcagaaccttcccttcgtgtggtctttgaactgacggatggcaagtggtatgtcaccgactgctataacgactggtacaacttcgacctccctattagtgaactggaagaaaccattcaggcggtacaagaggaaaacaaggctttcgaagaacttcatccctgatgaagctggggcagaaatccgcctcaatcattattttatccttcttctgtacgatttatgcccccccttttccaaaaagaggggtttctttgtgccgtactaatgcattggaatatgcagttacaacttcttttgcagatttccaagtagcaaatatcgataaccttaaataaacagccatgatgcaattcagtaaatggaaaataggagcggcagcgctcgtttgcatgttgctgccgggcagtgtacatgcgcaaatcgtgaagaatgagcgtttgctttcttttgaggagagacaggttccggcgtttgtcactacggcagccggttcgcagttgggcattagcgacgaacattatagggacggcgaccacagtttgagctggactttcgagccgggtgccgcactgtccatcaagaaagacttgaagtttgagaagaaagacccgacggggaaagacacctatctttcggctttcatcgtatgggtgtacaatgagcaggcccaggacaagcagattcggtttgagttcttgaaggatggcaaggtatacacctcttttccttttggcatcaacttcaccggttggcgcggagcatgggtatgttatgaacgcgatatgcaaggtaccccggaagaagggatggacgaaatccgaattgtagcccccgacgtgaaggggaaactctttttcgaccatctgattactgccagcaaggtggatgcccgccagcagactgccgacttacaggtaccgtttgtaaataagggaaccaccaaccactggctggttatctacgaacactccttgtggaaaccggacatccctctgacagacgtgaccgaggcgcagaagcaggatatacggattatggagaaacgtttccgcgacatgctctacacgccttccgcactttcggagaaggagatgcagtccatccgtaagaagtatgatttttatcggattacctacaagaacggcaaggtagcaggacgtcctatctatttcgtacgtcactccgaggcatacgaacgtatggtacccgattgggacaaagatatgttctccagactggggatagagataagcgactatttcaacctgatgaaacgcgtcgccatcgcctacaacaatgtggaggatgcggcgctgaaacacgagttgaagcagaaattcatcgccatgtacgataacgccaccgaccagggtattgcctacggcagttgctggggaaatatccaccattacggatatagtatgcgcggtctgtttttggcttatttcttgatgaaggacgtgttgcgtgaggcaggtaagctggaagaggcggtacgtacgctcaactggtatgccatcaccaatgaggtatatcccgaacctgccgtcaacggtattgatatagatacgtttaacaccaagttgcaaggccgcatagccagcatcctgattatggaggatacaccggagaaactgcaatacctgcgttccttctcccgttggctggacaaaggctgccttcctgcgccgggactggccggttctttcaagccggacggtgcctgcttccatcattgcaacaattatcctgcctatgcagtgggcggtctggacggtgccactaatatgatttacttgctgagtggtaccgagttccgcctgtccgagcaggcacacgagacggtgaagaaagtgcttctcaccatgcgtttctattgcaacctgaagcaatggtctctctccatgtccgggcgccatcccaacgggggaggaagtctgatacctatccaatatgccacgatggccattgccggtacgccggatggcaagcagaaatatgaccccgaaatggctgctgcctatctgcgcctggttgcctatacagaagctccggacaagaatgcgcccgactatctgccgaaggcttccacccgccacgaattggagatgaagaagttgctcgaagcccagggcttccgtccggaacccgacccacaaggcaatctggccttgggttacggctgcgtgtccgtacagcgtcgtgacaactgggctgccgtagtacgcggacattcccgttatctctgggctgccgagcactatctccccgccaacttctatggccgttatctggcacatggcagcatgcagattcttaccggaaaacccgatgaaatggttacttttgccaccagtggctggcaggaagccggtttcgactggaatcgtattccgggtgtcacgagcatccatctgcctttcgaccagttgcgtgcccgggtattgaatgtcgataccttctccggtatggaggagatgctctattccgatgaggcttttgccggcggtttgtcccaggcacatctgaacggtaacttcggtatggtgctgcatgaacatgataagtataacggttctcaccgtgcccgcaagtcgttccacttcttcgacggcaccattgtatgcctcggtacggacatcgaaaacctgaataccgaatatcccacggaaaccaccgtgttccagcttgccgccaccactcccgaaacccgtcaatactgggagtcctatcagagtgacggacagacttatatagaccctaacggcgtaggttattacatttccaaagcctcccgccctgatgcccggtacgagaagaacttcccgcaagtgaccgtgggcgagcgtagcaccaagcctacttccggtgattgggtgtccttgacattgcaacatggcaaagccccgaaaggcgcttcctacgaatatgcagtgctgccccacacggatgctgccgctttgaaggcattcgccaagaaacccacttacaagattctccgacaagaccgcaacgcccatattgtacgctctccggcagacggtcttacttcttacgtcttgttcgagactccgcaggcgctgcccgacggtggattgttgcagaaagccgatacatcgtgccttgtcatgatacgtgaatataaggacaagcttcttctgactgtctcccagcccgacctggccttgtatcgtggtccgagtgacgaggctttcgacaaagacggaaaacgtattgagcgcagtatctattcacgcccgtggactgacaatgagagtcaggagattcccgtaaccgttactttgaagggacagtggaaggttgccgagacgccctattgcaaggtggtgtcggcagacaagaagcagacagtgttgcgctttacttgccgggatgctgcaagcttagaggtagagttaaagaggtagggagagtataggttagacattgatactgaatacccacaacacccggatgttttaccccataacatccgggtgttttactataaaacatggggatgttttggggtaatacatccccatgttttgggtgaatacatccgggtgttgtgggtattcggtataggagtcttagcctttctctcctatagagaaagatactggaaacggttgtttaatatgttccgagcagattgcttactgctgactgatagtttgccagtttactggtcttatgaatggtctttctcgctttgcggtctccgtccggtaacagatactcccagaaacttttcattttcattaataactgtgcctcaccgccttgtagtagctcttgataggcgttgaagacctcggtgtgcagttgccccacctttttcgccatttcatcggaagaaatcggggttccttgcttgtattccagcgccagagcaggattggctagcagcccgcggccgatgacgatacctgccaatcgggggaaccgtgtggtgatagaacggatatcttccacggtatgcaggtcgccgttgtagaacagagggcgggtgcactctttgtagaaagcttcaaatcccttcaggtctacctctcctttgtattgctgcttgcccagacgcgggtgcaggatgatgtgtgcgagggggagttcgttgaatagcggtagcagggcaagacactcctccgcctgctcccaacccagacgcagcttcacggagaaacggatgtcgggatgccggtcgatggcttcggagagcagcgctttcacttcttcgggatagggcagcatgccggagccattgtggcgccgggccagcatcggaaaaggacaacccaaattgatgtccgcttcccggtatcctttttcgatgaaaagggacattatgtgctccagcttgtccgcatccggagcaatgagctgggggatgaggtgcaggcccggattgtggtccggctcaatgtcacgggcatctttccgccggatttctccgtgctccatgcgtacgaaaggagagtaataggtctctatgccgccaaagatgcgtgcatgcgctcgccggtagacggcatcggtgtagccttgtagcggggcgaagtggataggtaatatgttctcgttcatggctgcaaagatacatatttttctttctagtaggaagctgtgctactttttccggcttcttctttttgcggcatttcaagcaatatttgtttggcttgtccgttttgaatcagtgttattgttgctttttcaggattttccgattcacaacgtggatttgcgatatgtattcttttttctttttccttccacaaaagggcacaaggggtatctgtcgcaaggatgtcaccattttcaagtttcagttcccctggttgatagaagatgatttctgttattcttaatttttcatgacgtacagcttgtgttttttccgtattggcaagtacttttatcggcaactttgcagcatattttgcggcagcggatgtgctagggatgcttgggtgtaccacgtaggcgtatttcccttgctgcgggcggatgccgtgattggcgttcaaactgaacagtgccgtatcacaagttattttgtactcggtttggggcagcagattgaagtaggcggtctgtccgtggagtatccagtctgcaacggtctgtatggagccgttcttcagagtctgttttttcccatttgtcatgtactgtaccttcccgttgcggttacattggttgagagtggtgaatacttcggcttttcctttggcgttgcagatgcctgccccaaggcatacaaattcttcatcgaaatagaaccaggctttgtgagcttgtaatccgcggcggtctaaaatcatgccgcaggttccataaagactgtcgctgacacctccggcaaaacagtttccgttattgccgccttcaccccaatcgggaatgggaaggggggcattgtcttgttcggcagtaatgccgggatattggcggttgttgaatatcttaaagaaattgccgtcatactcgtgtccggtgacaaaaagataatttactccgttggaggcataatagttgaactcaccatcaccgttgccggcctcgttgcctacggtacgggtggaggtcatgcgtgaactggtcatataattgttgcggcggtgtaccatgtagtcgaaacgccagaacatgcggttacccgtcaggctgttgtctccaccgatgtgttgcagtgcttgcttcatgttgttgcgtgcatcggagttgctcaacttgcagattctttcggccagaacttttatggcagaggagtattggttgctgctgataaagcgtcctgcattgttggggtcatgctgcttgttgtagaatatccattgtacgccgtcggtgaagaggcgttgcaataattccagtccggggctttggaaacgggtatccttgcagagttccagataagcgagggtggagttaacgaattctttgccgtagctggtgaagtaaagttgccgtccatgaccgcaatgttgcccgaagagatagtcaggttgtatgccttcggagggttgtatggtgagcagttgcgtcatccgttctttgaagtcttccatctggctttcgttctcggtcaggatgctggcggcaaatgaccccatgatgatgtcggcgccgttggctcctgtcatgtgtgagggggcggcattctcgtagctccagcgtaggtatttgatggtcttgtcaaaaagttctggattttcattgatttcgcggctcatcagcactacgctggtagatagttctttgggataggggatgtaacgataccaccagtttttggcttgatggttggtgtctatccagaagcggagcgctttaagataagactctttcagcgttttgtcatggtagaatgtgttctctggatgttggtaggcgcaggccagggcgatgaggttttgtacatgcttgcgtggggaaccgtcggtagcgcgatagttgagggtgacgaatgctccttctggtgagagggatttcatcagtccgccaatagtttctttcgatgtgttccggtcgaggtacttttcgtacatccggttgtagatggtcttgaagtcggaggcatgggcacgaatacctgtcaatgtaatgcacaaggcaattgctgcaatgagtttgatgttatgggttttcatgttgatattctttgttatattaggggatttatgaatcagggaagagcctcgcggttcctccctgacaaagttaattgattaaggtctataaaaatacttaaggttagaagttttgtgttgatagaacgtttttatttcattattcggttaccatcactttatattcacgtaccacggaagattcttgtttgtagtttccattggtggctacaaaggtggctgtgtaggtaccgggagtcttgtaggtatattgataagagtcaagactctgggtaacgttcttcaatccggtgcctgcgtcgggggaacatgcgttgacaacaaacagattggaaaccagccagctatattttaattcagtattggcgttggaactatgaatgaagaaagcgttcatgtccttgaagttccagataccggaagtgttgttggtgactgtgccataggcacggttggaagtcatactcttctggtcgctcaggttatgacggtgcaacatattgataggggtgaagccgaaagatccggcggtgaaagtcgtctcttgtcccttggacatttggttcaatatctgcatgttgctaaaagtaaatctcgtttgtgccacactgttggtttgaccgcgatagcagatggctatggcaatacgtttgcccaaatagggcttcatgtctatggcaaagtcttgtgctttggttgcagtagggaaatcggaagccgggatcaatgtttcccaagcgtgttgctccaccagtacggagtcggcttcaaagttccctttttctatgccgggaaagtcggaggatacatacatggtgagtatgtttgctggatttccatattgtggggtcagcttgaatttcaaagttgaagtttccacctcactttcgtctactgtagtacgttctctgtatttatattcttttccggcttcaccgctgtaaaaagtgaggaagtccgggtcacccttgaaatgaaactccaccggagttccgctttttacggtgatggtctgaccgtcgaaactgacaccgtttccggttgccacatttacatccagttctgcatctttagtgaattcgctttcgcaggaggcaaaagtgaaacttgcaatgctgatagctatcaatagtttatttagtttcatgatatgattcatttatttggaacgattatctttgtttcactcattcgattaccaaccaggattattctgggtgatggctttgtttactgacatttcactgtccggtatggggaagtaattgtaagcgtctgttatctggaagaaggtatagacgctgtagctaggtcccgtagcccagttggcattggcgccttgaagggcacggggagctaattcattcatgtttttcacatattcaccccagcggataaggtcgtagcggcgggtatgttcaaagcagagttccatagcacgttcatctttcactgcctgacggaaggcttctttgctgaggcttccttcttcatagggagcgatgccggcacgattacgcacgtcgttcaaacatttgtgagccagtgtagtgggagaggagctaatttcattctctgcttcggccaccatcagtaatacgtccgaatagcgtaacaatgggaagttgagtgaagtgtagttcttgttctttttggtgccgtatgcctcatattctctgcggtattttccgcaagcacgtgagtagttcttttctgagtcggcttcggttttctcgtaatctcccgttttcttggaagaatcaccttcgccatagctgtaagacacatcccaatattggtttttcacttcttccagcttaccgtactcgaattggcgtcctgtaacgcctttcttgcttacggcctccacgtattcgaatggcgcaatattccagttcatacggttgatgtctccattatccttgtagagttcatatagtttcggagttgaccagaagtatgcgtagccaaatccgggatctttagcgtctattaaagattgatcgttggattcgtcaggacatttgatgcctatcaggtttccgatacgtccttctgctctgacttcggaagtatagtctccggcaaactctgcctcccagatactttcattggctgtagtattgtattggttagaacaaaggtcgatgaatacatcccagtagttggctgctaagccatgtccttcgcccattactttttgtgcataggtgctggcttgcttgaaataattttgaatggctgtagcgtctccgttggcattgtctcggaaatgctcgccggcacggaataaatagacacgtgccagaataccccatgctgcagagcgtgaaacatgtcccggcttgtagcctagttctgcggctgtagcaagaccttcagcgcattcagacatttcggtggtgatgaaatcatagatagtctgcttgtctgtacggggaatgtcaagtcccgttacactactggtggaagttgtcttgaagggaacgtctccccagccttgtaccagtgtgaagtagtagtaagcgcgcatgaaacgtgcttctgctgtgtactgtaggagcaatttgtcggatatgtctttgcttttgtcaatattctcaagaaacgtattggcacggtcgatacccgtatagagtgtttgccaaagattgctgaattgcggtgaacttgaattggcattgttacaggcaatcgcaccgctggtttgcggattgcgaccaccaccataatgggacaagtcatcagcacccgtcatgaacatgtattcgtttccgtagaagttctgtgaggtcagtggggcgtatacagaggtcaggaatgagagagcttcatccgcattattaaagtaattgtcgggagtcagcttagtaggttctttgtccagaaaatcgcaggagaccatagccagacaagtcaaagatagtattattgtttttattgttttcatattatatttcagtgctttaatgggattagaaacctaaattgataccgaaacttacggagagtgcacgtgggtaagacgagaagtcgagtcccggagtcagacctccgctacggatagatacttcagggtcgtacccggagtatccggtgatggtccaaagattttgtgcagctacataaaggcgtgcattatcaatcttatacttcttcaggaaagtttttggtacggtatagcccaatgttacggttttcagtcgcaggaatgaggcatcttctactacacgtgaagaaatcacgaggttagaacttgagttggtggctgccggaatatcactgttcgggttttccggtgtccagcggttggtatagctggcatattggttcagctcacgtttcttttggaaaccgctatcgaagaacagacggttggcattcagaacgtcattgccatagctccattggaaaaatacgcttaagtcaaagcctttatattcgaagttgttggtgaaacctccggtatggatgggcagaccgcgtcctatcatggtacggtcgttagtgtcgatgatgccgtcaccgttcaagtctttgtactttggcataccgggctgtgtattgctttcgctcacgtagtggggaatgttacctttcagcgtataactgctaccgcttttgtcaaagtcatcgtacttgtaagtgccttcgtagatatagccgtaaatcatacccatcggttggcctatcttagcaatgtagttgggctggctgttaaagttctgatcaaaagtggcagtgctcaataaactggtttggttttcagcgagttccaacactttgttcttgttaaaggagatattgaagttgctgctccatttgaagtctttattgtctatattcactgtgttcaaagtcaattcaataccgtcattgcgcaccttaccgatgtttttcatggctgtcagataacccgaagagtaaggaagagtggcatccagcaacaagtcgcgcgtagttttgcgatagaggtcggcagtaaagctgatacgttcgtcaaagaatcccaggtcaagacccaagttccactgttcggtggtttcccattttaagtcctcattgggtagagagatgggggctacaccgacgttggcgttattgccgtcaaaaggatatactgtgttattcatgctggtagtggcatggcttttaatcatgtccagcaaggcaaggtagtcgtattcaccgatacggttgttacccgtaagcccccagctcaggcgaagcttaccacttgaaagccatttcttgtagtccttcatgaattcttcttcggagaagctccatgccagtgagcctgaggggaagtagccgtaacggtttttcttactgaatttagaggaaccgtcggcacggaatgaagcagtggcataatatttggatttatagttgtagttcacacgtcccagataagacagcatagaccaggaagacaacgtggaagtactcttgtcaaaagtaccttggctcatgcctgccatacctagtgattcgttgggaatctgcttcatgcgtaatgagtaatattcatagtcagagttctgtaatgtcacaccgagcaatgcattcaggaagtgcttgcttttgaagttagtctgataggtcaggatgttttcattcaaccacgtcaaacgttgctggcgcactacttctgcattcactttgtcggtagatgtaggaccaccgtaacgggtcttggaattgttgaaggtatctgaatggcggttgtcataagtccatccaccggacactttcagtttcagccccttgataaactcatattctacgtagccatttagctgaagattgttgacgtagtacttgcggtaagcgttcttcaggtcggcgatggggttgaaacggtagtcgttcgatgcatctatgtcatcgtccacaagatcattcagcagagagtcaagagacttaccggggtagttaaccggacgatacccccatacactatagaagaggttattcatgccggagtaagaacttgaagaaggagatgagccactctggatggaacgagagaagttggaattgaagtttatggtcagcttaccgcgttttaccaaagtattcagacggctttgcagacgctcgtaattggagttgagcaggataccatcttggtcgtaataagaaagggatgcattgtagcgtataccttccgaaccgccggacagacgaacattatggttttgctgccatgcagtgcggaaaatttcgtcttgatagttgttttgggcaatgccttggtagtcgtccagcgtccattgatgtccctcgtatagcggaaggtatttttcagtggcacgggtaggatctacttcgagttgtagtttcacgtaatcataagcatccatcatgtccagctttttagtaacggtggagataccgaagctgccgtcatagctgagttgtggtttacctacttttccctgcttggtggtgatgataatgacaccgttggcaccacgcgcaccatagatggctgtggccgatgcatctttcaatacatcagtcgattcgatgtcgtttgggttgatagcagctgctacgcgtgcatcttccactgggaaaccatcgatgatataaagtggggtattgtcttgtgttagcgagttgttaccgcggatggtgatggtcatcgtaccgccaggcataccttcacctgagcttacgtttacaccagcgatacggccgcccaatgtctggtcgaaagacgcagaaggagtcttgagcaagtcgctcatgttgactttggatacagaaccggtcaagtctttcttacgaacttcctggtatcccacaacaaccacctcatccaatgcctgggcatcttcttccaatgtgatattgaatgtcctctgctcacctactttgatgtcttgggtcttgtatccaataaaagaaaattgaaggatatcggaggattttacgttacccaatgtgaactttccttccaggtcagtagtagttccgttggtggttcctttcacaacaacgctgacaccgggtaattctcccatggcgtcaacaactttaccgcttacttggcctccagtctgtgcgtgtataccgagtacacagcaaaagagcattgcaagtagcataaaggttactttctgtttcataaatattaatttaattagttattaataaaggctgtttcttcgttttgtactcactttagagttgaatcacatcgcaaatgtaggagatggaatatacaaatgccttagttaatagttcgcaaaaagtacgaattcgtacaaaacttgcgagcaaccacactcttgtacttttatctcctttcgctttgattctttgcttccttcacctctttcagtaggatggagagggcttttaccttgtccggatgagcttctgccacattgtctttttcggacggatcgatggaaagattgtacagttgaggctgtggggcgtttcccatttctgttttcgtccagtactccagtgccggtttgttgctgggctctatgtatttccagtctccctggataatggagagtgtattgtccagattctgttgtacaatatagtcacatccggcagtatcggttcccaggaagttgttgagctggtcgcggctgtcgggagcgatgcctgcttccagcggatggttcagcagggcggcgaatgaagcgtatacatcaatcatggagaagagggcttgttgtttgccgggcttgatgccattgggccagcgtacaatgaagggaatgcgggtaccggcatcgaaagcgctgtacttcccaccgcggtagtgcttcatgggagtatggccattcagcagttcgtgtgcctggtcctgatagccgtcgtctatgacgggcccgttgtcactgcagaatacaaaaatagtgttgtcggcaatgccgaggctgtccagggtgtgcatgatttcacccacagtccagtccagctggaggatgacgtcgccacgtacgcccaaaccgctcttgccggcgaaacgtggatgtggcacgcggggaacatgtacatcttgcgtacccatataaaggaagaaaggttcgtctttatgggctgtgatgaagttcttggccttgtctgtaatcacgtcggcaatgtcttcgtctgtccaaagggcggatttaccgccggtcatccagccgatgcgggggatgccgttgatgatggtgttattgtgcccttggctgggtttcatcttgacgagttcggggttttcgagaccggtgggccagtcaccgaccttgtggtcgtagctcaccgtgatagggtcgttggggtcgaggcccactacatgtccgttctctacaaagacgcagggaacgcggtcgacggtagcggggatgatgtattcatagtcaaagccgatgtcttgggtgttcggtttgatggagtggttgaagtctgtaccgcctttaggacccaggccgaggtgccacttgcccactgctgcagtggcgtagccttcttccttgaacatatcggccatagtgacgcaggcggtatcgatgatgagttcggaattgcccggagcaatgccggtattcttctgtcgccagggatacatgcctgtcagcaggccgaagcgggaaggggtgctggtggaagaagtggcataagcgttggtaaactgcatgccttgtccggcaaggcggtcaatgttgggagtgcttactttggtggcaccgtaacagctcaggtcgccgatacccaggtcatcagcgatcagatatactacattgggcttctgcggcaagtgctccgaagtcttgtctttaggttggcttccgcatcccgctatcagggctgcaccgggaatcagagaccacaagggggaaaaatgcttcatagttctttgactttagattgtaattctgaggtcaaaggtaagaggttttgtggaatcgggtgtatgaggaagtacaagggaagggagaaaaagtacaaaccgtatcatgcgatggcttgatgtacaatattaagatgtctcttcactgtcttccgtactttcctctcctccattctctcctttgcggtaggccagcgggctgacatggtaaatgtccttgaagcatttggagaaatagcgtgaagaactgaaacctatccggtccgcaatttcagtgatattcagttccggattgttgcgcagcatcagagcgcctttcttcaggcggatggtcaggataaagtcattcggagtctgtccggtgatagccttcagcttggtgaacagattggtgcgtgccattgccatttcacgggcaaagacgttgacgttgaactccgtatcgtccagatgttgctcgatgactgtcatggcgcggtccagaatctctttgtctatggggttggtggcaagcatctgtacaaaggcttgcggttgcttgctgaatttctcctgcagaaggatgcgcgagtttacgaggttgttgcaacgagaaatcaatagattggtgttgaatggcttggtgatatagtcgtccgcaccgatgcgcagtccctcgatattctgttcgatggcagtacgtgccgtgagcagtaccacgggaatgtggcaggtgttgaagtcactctttatctgtttgcacagttccgttcccgacatgttgggcatcactacatcgctgactacgatattgggcatttcgctacgcaccagtgtaagtccttccgctccgtcggccgcagtcagtacttcgtagaacggcttgaagatacctgccagcatgtcgcggatggagtcgttgtcttccactatcaggatttttgcatccgggagccgtttgatgggagcattctcttccagctctgccttgagcaaggcatcgttttccggtttgggaatttctatttgttgcacactgtctgcattcttatttatttgctcttcgtcaaactgtgcgttccccaattgcaggtttacgatgaagctgctgcctttgcccagttcgctttccacacggatggtgccgtgatggagctccacgataccctttgtcaatgccaggccgatacccgtacccgtcttgcttgcatccgtagagtccattgggtctatctggtagaagcggtcgaatatcttgtccacttcccgggcatctatgccgctgccggtatcggtcacacggatgacggcattgctgccttcggtcttgatgctgagggtgatgctgtcttccgccttggtatgcttgacggcgttggacagcaggttgtttatcactttctgcatctgtttttggtcataccacacttcgaggctgtctgtttccttttcgaagtagaggctgatttgtttggcgctggcatattccaggaaaagcagatagttttcgtataggaagttcacgatgttgtgtgggcttacctttatcttcatgtgcccttgttcctgcttgcggaagtcgagcagctcggtgatgagttcccgtagctgtatgctgttcttgtagatgcccaacaccttgttatatatggcaggcgtgaagttctggagttgcatcagcgtttccacttgtgccacgatgagcgtcagcggggtgcggaattcatgggaaatgttggtgaagaaacgtagctttgactggtttagggcctctacgtcacggatgtgcttctgttcgtacttcagtgattcacgcaacttgattctcgacttgtaggtacgcaccagataccagagcaggattcccgtcactatcaggtagataagataggcaaggggagtcttgtagtagggaggcaacacgtgtatggtcaggtggacttgcggacaaaggctctcgtcttttccgttgggctttataatcaagttataggttcctgcgtttaggttggtataagtgatgttgtgtagtccacgagtgctgttccaatcgttggagaagccttccagtttatagatgatgtcgtctttgttggcggctacatagtttgaagtggcgaactctatgctgaacatggactggtcagcgttgagcgtaatctcgggggtgcagtacaaggcttgctgcaggataccggtctcatctcccacttgtatttccgttccgttcacaatgaggcgggagaggatgattttgtagggtttcggcgtgaagttcaactccatttcatggaaggaaatcattccctgcgtgcctcccaggaatatttctccgtcacgggtcacgcaaagggcattctcattgacggcagtcattgggaaaccgttttcggcactgtagttcaggaatgccttctgccggtagtcgaagatggagaagccttcgttggtgatgagcagcagtttgccgctggtgggggattcctgcgtctcgtagatgcagttgctggaaagaccgttcttcgcttggtcaaagttctcgaagtcgttgctggcagggcggtataagtccagtccgctgcccgaagtggcgaaccacagattgcctttgctgtcttgggtaatgttgtttacattgttgttgctgatgctgtgtgggttggcagtatcatggcggtagttggtcagtttgccggtatcgaaacggtagctgaacacaccttcgcccgtggctgcaatccagagcgtaccgttgctgtcgaaagtgatgtctgccaccatcttgattcttttgccttctttgctgtcctggaacagttgttggcatttcccgttggcagggtcgaagaggcagattccgttttgggtggccactaccagctggtgctgataaggcacgatgtcgcggatgatgtcggaaggcagggtttccggattgtctgcttccatgcggtagtgtgtgaatcggcctgagtgtatgtccagtctgttcagtccgcccagatgggttcctatccagatgatgtctttggaggcatcataatagagagccttgatgttgttatgggaaatgctgttgggaccgcttcccgggcggaaccatttgaattcacgggtacggcggttgtaatagttcagtccgcccccttcggtgccaatccacagattgccgttcttgtcttcgatggtgcggcctacaaccggattgctcagtcctttcttttcgatgggcgaatacatatagcggctgtatatctcgtactcggggttgaaatagttgacgccgccaaagtaggttcctagccacagcgttccttggttgtcctttacgatgcaccagatggaagagtgtgtcagtccgtcgctctgggcatcactggcagtgtggttctggaagagtcccgtacttttgtcataccggttcagaccgttgaaggttccaatccagatgtttcccagattgtcttcacagcaggctcgcacgaagttggaagagatgctgtaagggttctttgcgtcgtattcaaagatttcgatggttccgtcggtttttacatggtgcagcccttctttccagctgccaatccataactcgccttcgctgtcttggtatatgctggtgatgttgcctttcaggatggggtgggtcagctcgttcttgtccagttgcaggcggtatgctccgttggtggtcgttccaatccacatttgtcctttgtccagatgcatacagcagatttccagactttttccgggaagctggtaataaaggtcaaagtttccggtctgctcgttatagcggtagatttcattctgttttccgatgaaaagggcctctttgtaatatatgctgtgcacatttccttgcagcagggtggtgaatctttgggtggcgaaattgaactcggctactccttccgtacagagcaggtagatttttccgttacggttgccggccatgcgtagcacggtgttgcagaaaaggctgtaagggttgttcttctgcagcttgtaagtttgtatgtcttctccgtcataacggttcaagccttctcgggttccaatccataaaacaccgttttcatcgatgtaaagactgttcacggagaattgtgacagaccgtcgtcggtcgtcagatggttgaaggtgatgttctgcgcctgcagggttgcagcaatcatgcttactgaaacaagaagcagccggatgataaacgttcgcacttttcgggtagtttttaaggtttcagttacaaatataggtatattttgtacaagacttcttatttattaggcggtttttgtggttatgtttggataaatgtataattttggaagcgcgccgaacgatacttgccttttggtataaggctatcagcgtatctttgtaaacaaattaattcatttattatcatgaaagaccttttatctattgtatctcattttcaaatgcagggtacagttcgtgaaatcaagcctttaggctcaggcctgattaacgatacgtacaaagtgaccaccgctgaggccggtgcgcaggactatgttctgcaacgtatcaatcatgccatttttcagaatgtagagatgttacagtccaatatcgaggctgtgaccaggcatatccgtaagaaactggaagagaaaagagaggccgatgtcgagcgcaaagtacttcatttcatccccacggccgaagggaaaacctattggtatgacggtgagaactactggcgtatcatgacttttattcctcgtgccaagacttacgagacggtaaatccggaatattcctattatgcgggagctgccttcggtaatttccaggctatgcttgccgacattccagatacattgggcgagacaattcccgatttccacaacatggagttccgcttgaagcaactccgtgacgctgtggctgccgatgcggcgggacgtgtgcaggaggtgcagtattttctggatgagatagaaaaacgtgctgatgaaatgtgtaaggcagaacgcttgtaccgtgaaggcaaactgcccaaacgggtatgccactgtgatacgaaagtaaacaacatgatgttcgacgaagacggtacggtgctttgtgtcatcgacctggatacggtgatgcccagcttcatcttctccgattatggcgatttccttcgctcaggtgccaacacggggttggaagatgacaagaatctggataatgtgaacttcaatatggaaatattccaggcatttaccaagggttatctggaatcgggcaaatccttcttgttgccgatagagattgagaatctgccttatgcggctgccttgttcccatacatgcagtgcgtacgcttcctggcagattatatcaacggtgatacttattataaaatccagtatccggagcacaatcttgttcgtaccaaggctcagttcaaactgttgcagagcgtggaggaacatacaccggagatgaaaaagttcattgactcatgtatctgaaaaagtatctgatgacgatagcagcagctctttgcatgctgccgttgtctgcaattaatccccaaaatagtaaaatgaaagaattgaatgtaaagaaagtaagtgtggccaatataccggtagagtcggttccggctcttctggatgaagagaaagtggcgtttcagcccgtaaatacagtgaattgggctgcttttccttatgctcccagtgtggagttccgcatagcgcatacggaagatgccattctgctgcatttcaaggtaagggaagcgagtgtacgcgcagtggcaggacacgataacggtccggtctgggaagatgcgtgtgtagagttcttctctgtgcctgccggtgacggagtgtactacaatatggagtgtaattgtgccggaacgctgcttatcggggcaggtgccggacgtggaaaccgccagcatgccccgcaagaggtgctcgataaagtacagcgttgggcttctttgggacgtgaggctttcgacgaaagagtaggtgagtgtgcctgggaagtggctctggtcatcccttattccgctttcttcctgcatgacatcacttcgttggatggaaagacgctccgtgccaatttttataaatgcggcgataagctccagactccccatttcctttcatggaatccgataggtctggagaagccgaacttccattgtccggagtttttcggcaccctgcatttcgagtagtagtagaacaaaaagttactcaacctgccctcaccactatcactgttttcctgaaactccctattcgtcgcccttccaggggtgagtgagggcaaataaaaagggtgagggcaaattttaccctcacccttccgggcgtacccggttgcttcctgcttctttccccgtcttttataggacaagacaaaccattgtctacagaaacagtataataaataccctttatatacttaatccgttagttcacaacactgaacactttgttccagcatagagaacactttgtttcagtatagaaaaacactttgttttcatataatggaacgaactgttttgttaagggaaacaaagtgttctctataaggaaacaaaatgtttagttaaaggaaacagtttgttttacttagcatactgcttggaatgagtgtgcattaaaaaaggataaagactatgcaggaactattgtagaggtatatagaaaatggcacgaactacgcagacttgcagaaaagaatctgtccatccatgattgtctgcgtgattcgtgcccgaagaagggtgtttacttcacgattcctttggaattcttgatgaagttgatgatattgtgtatctcgtcactcatcggtacttggtcttcaatcttctgcaaggcatcctgcacgctgaagtttccctggtataccagacggtaggcatttacgatatggcgcaatacacgttcactcacctggtgtttgtgttgaagcacagcagcgttgataccgtggtattctgctggattaccgttcatgatgatatagggcggcacatcctttgatatgcggcagccagcttgaatcagtacccaacttccaatgtggcagtattggtgcagaatgacgttgctgctcagaatggtgcagtcgtctatctgacattctccggctacggtagtcttgatacccagtacacaatggttgcctatctgcacgtcgtggcagaggtgtacaccatccatcaggtagttttcattgccgatgcgggtagcgctttctgcatgggtggcacggctgacaaccacgttctcgcggatgtcgttattatcaccgataatcagcatgctgttctctcccgtataatggaagtcttgcggttcggcacccagaacggcattgtgatgtaccttgttcccttttcccatgcgggtaccgtgcagaatttttgcacccgacataataatacagtcatcaccgatttccacgttcccttcgataaatgcaaagggctggatggttacattcttgccgatttttgcggcagaatctacataagctaacggacttatcatagtaattagcgattaatgattaatgattagtgataaatggtcagtgattaggatttactatttcattaatcgctaatcactaatcacttatcgctcattttattctcttcctcctccaagcgcttgatacaggctgatgactgcctgcatgctgctgaaggtgtcggatacttctgcaagctgtgcgctgaggtaagactgctcggcagacaagacttccagataggtcgacgtgcctaagttaaacaattcttttgtatctgaggcagcttggcgagcagaatttacttgaatagtgcgtgaaacggctttgttcttctccatttgatacaggtgcagggcgttgctcacttcatttccggcattcagtagggcggtttggaactgaatcttagcctgctcctcttgtgccttggcttgtttcagacgggcaatgttggcaccgcgatagaacaagggttgcgtcagcgaaccgatggcagaagccagcagtttgcccgggttgacgatacctgcaccggagttattggtccagcctcccgaaccgctcaatgtaatctgcgggtagaaggcggcacgggcgctattggtgttatagtagttggcagccagtgacatctcggcagctttcacgtccggacggttggatagcaactgcaaggggatacctactgaaaattccgtaggaagctgttgatcttccagtacaccgcgtgcgatgctctgtgccggttggtgcaacatcaggcagagagcgttttcggtttcgcgtatgctctggcgtatgtcgggcagtgatgccatgacttgagcgtaggcggtgcggctctgctctacggcagcagaagtggttccgtagatgcctgcatctttcatggcttgcacggtctccaagttctttttcagaatctcgacggtgccttcggtgatttgcagttggcggtccagcatcagcagggtgtagtacatgttggctacaccggcgatgacttgcgtctgaacggcttgttcgtagaattgcgtctgcttcaagctaacctttgcttgtcgcttcgggttcagcaattgaccgaagaggtcgatttgccagcttgcggtaacgggcagggagtagatttgtgtagcctttcccttgtcccagctgctgacggttccttgcggagacaaggcaagcgtcggagcataggcaagacgggcagacatcagtgcggcttgtgcttgtttcacgttcaaggcggcactgcgcaggtcaccgttgttggtgagtgcttgctcgataagtgtctgcagctgcgggtctgtgaacacttctctccaaggcagattaccgaagttggctgtatctgcggctaatgtatcgttcacggacgccgtgtcgcgatacagtccggcagttgttatgtcttcgggtctgtcgtatgatttgtagatgtggcaactgctcaataaagcagttgcgcacatcaggcatattattttcttcataatcgctaatcgttaatcactattttgtatattgttcaatctcaggttctgcatccgagttgtccacatcttcccattccatcggtttgaatttctcctgcaagtactggaatgccacgaacagtgcgggcactatgaagatttgcagaatcataccgattaacataccgccgatggcagacgtacccagcgtacggttaccgttggcacccgcaccggaagcaaacatcagcggaagcaggccgacaatcattgccaatgacgtcatcaagataggacgcagacgggctgcagcacccaatacggctgcccaggtgatactcatacccattctgcggcgttcgagggcaaactctacaatcaagatggcattcttggccaacagacccatcaacatgatgagggcaatctgcatatagatgtcattggacatcgtgcccagaatcatcttcagtgccgggatactgcccaatgtacctataccgcttacaaaaaggaagctacccagcagaccgaacggcacggacagcaatacggataaaggtaggatgtaactttcgtactgggcactcagcaacagataaacgaatacgaagcacaatatgaagatgagtcccgtagtgcttccactcgtttcggcctcttcacgcgccatacctcccagctcgtaaccgaaaccggcaggcaggttttcctgcgccacttcggcaatggcttgcagagcttgaccggaagtgtagcctgatgcgggagccaccatcactttcatggaggtgtaaaggttgaaacggctgatgacgtcaggaccatatactttcttgatggagatgaattgcgtgataggtgccatttcgttgccgttgcgcaccttgatgctctgtagtgtttccatattcttggtagcgtcaggttcggcttgtaccattacgcggtacatcttaccgaagctattgaagttggaagcatacaaaccaccgtaatatccctgcaaggtagtcaagatgtcattggggctgatgcctgctttcttacaagcggcagcatcaatatccagctggtattgcgggaagtgggggttgaaggatgtcttggcagagttgatttcagggcgtgcttccagggctgcggtatagttgttcaccacgtcgaagaagtggttcaaatcaccacccgtcttgtcctgcatgttcaactcgatgtcacttgaagccgagtaacccggaatcataggtggagcgaagaacaatacctgcgcttccttgataatcttctgggcacgcatgtataatgtggcatagacaatggtagagttctgcatggtggagcgttcttcccagttcttcagcttgatgatgatagaaccataggaaggaccttgtccacccagaaaactataaccggaaatgacggtacgcgattctactgcagggtcggcagcaaccagactgtctacgcgattcagaacctcttgagcacgttcttgtgaagtgccgggaggcaaagtaacggcacccataatggtaccggtatcttcgttgggcaccataccggtaggagtaatctgcatgaaaacacccagcaatacgatggaaccgataaccaatcctgccgatagccatcgtttttggatgaagaacagcacttgtttcttatacttgcccaagataccgttgtatgagtcattgaaggagtgtttgaacttgtcggtagtcatgcctgccaacgccagcacactgatgataatcatcaagctgcacagaatggggtgttcgctgaagctgaacagaccgaaaatcatgcccagaatagctaccgtcacgaagagcaacgtgatacctgggcgcatcaaccgaccgagagagtcgacataacgagcaagcataatcttgcgcgcttccttggcggcaacgcctacacgctctttcagactttcgtgtcctccattatgaggtttcaagaagatagcacacagagcaggactcagggtcaaggcgttcaaagccgagaaaccgatagcaatagccatagtcaaaccgaactgacggtagaaagtacctgctgtacctcccatgaagctcacagggacgaatacggacatcatgaccagcgtaatggagacgatagcgccgcccaactcactcatggcgtcaatggaagctgtacgggctgatttgtaaccctggtccagcttggcatggacgccctcgacgacgacgatggcatcatcgaccacaatcgcaatggcaagtaccatggccgaaagggtcagcaagttgatactgaaaccgatcagcttcaatacgaagaaggtggcaatcaatgccacgggaatggcgatggcgggaatcaacgtagaacgcatatcctgcaggaagatatacaccacgatgaacaccaggataaaggcttcgatcaatgtcttgattacctcatggatagaggcgaagaggaagtcgttggcactctgtgcaatgtttatcttcaagccggcaggcagtttgctggaatagtcgtccagcagggcctcgatatccgagatggtttgtgtggcattactgcctgccatctggaaaatgatgcaacatacggctttatgtccgttaaccatattgttgaatccatatgacagacgacccagttccacatttgctacatccttcagacggagtatttcaccgttttccaaagctttgatgacaatgttctcgaactctgtagtctgttgcagacgtcctttatagcgcagggtatattggtaagtttggttaccgcgctcacccaactggccgggagccgcttcgatgttctgttcgctcaaggcggcaaccacatcgttggggataagtttgtattgggccattacatcaggtttcagccagatacgcatggagtagtcctgtcccaataccatggcatcacccacaccgttgacacgtttcacctcagggataaggttgatgttggcgtagttttccaggaactcgatgttgtactggtctttttcatcatagatggagaataccatcaacatggaagtctggcgtttacgggtggttacaccgattttggtaacttcggcaggcagcaagccttgtgccatggaaacgcggttctgcacgttcaccgctgccatatcggggtcggtaccttgcttgaagtagatggagatgtcgcccgaaccgctgttggtggcgctcgaactcatgtacatcatattttccacaccgttaatctggtcctccaacggagcgataacggagttcagcaccgtttgggcattggcaccttggtaagttgcacttaccgatacggtagggggggcaatgtccgggtattgggtgataggcaaggtcgccagaccaataactcctaagattactatcaggatggaaattaccgttgatagtaccggacggttaataaatctatctagtttcattttatttagtgattaggggttagtgattagtgataagctcgtgtgatataatggcgcagccgcttatcattaatcactaaccgttaaacattaattgaatgccgtttgaatgttaccttctttctggtctttcaaggccttctggtattcggcttccttttcagcaggcgtaataggtgtgatggattgtccgtccttcaggttctgtaccccttcgataacgattttatcgcctgctttcaaaccttccgtcacgtaataatacttgccatcgtctaagctgaacactttgacttcggtatttttcaacgtattgtccggttgcagaacgaaaacgaactgcttgtcctggatttcggtagtggcggcctgtggaatcatgatgacatcatgcaaagggttggggaataccacattgccggtgcttccgctacgcaacacgttgtgcttgttggggaagagggcacgcatggttaccgaaccggtagtttgatcaatgactccgctgattgtctccacgcggccactgtcggcatacatggttccgtcgatgagctgcaactgtacatccggcatcttttccagaatttccttgatgctgccgccttcacgaatttgtgacaaaagttggcgttcggtcatggagaaataggcgtacatttcggagatgtcggcaacggtagtcagcgggctggctacggaaggactaactaggctacctacgcggtagggaatgctacctactacaccgtcactggggctggttacactagtgtatgacaagttgttcttggcattgaccaattgggcattggcttgtgctagttgcgcctttgtctgtgccagttggttttcggccatttgcaaatcgtagtcactgatgatgtttttcttgttcagttcacgtttgttgtttacagtcagttcttgtgtgtttacggcagctttggctgtttcaacagcagctttggccgaatttacggctgcctgatactgtacggggtcgatgctgaacaacacttgtcctttgcgtactgttgcgccttcgtcgacgtgcaattttgtgatgaaaccgctcaccatcgggcgaatttctacatcttgtttacccttgatagtagcagggtagctgtttgtcaagttggcagtggtggtttttgcctcaatcactgcaaattcgggagctttacccgttcctttgtcgccttgtccgcaactgctgagcagtgccaggcaacatgccaataatactaatctactcttcatactctttttgttctctgtataattttatattcttcttttttcgattcttgaaaggcgttttggtgtgcaattcataatttagaaataaggcaggaaaaagaaaactgaatactcctattcagtttttcgtctgcaaaaatattcttttcttagtatataaggtgtgaaacagttccttttttaactatgtttcatacatagatgagaacaaaaggacattttttgattaaaatactgtaaagcataccgctaattggcagataacctttatttttgcagcatgttagaacgtaaacgccatactaaaatgaggccgcttttccgcaggttgttggggggtgttgccatagctgccgcactgtattcttgtgccagtgtgggccgtattgaaggaggaccttatgatgagactcctccgcgttttatttccggtactcccacgcccggtgcactccatcacaataaaaataaactttccattgagttcgatgaatttatcaagcttgacaagccgaatgagaagattgtaatatcccctccgcaggtgcagcagcccgaagttaagtctaatgggaagaaggtggtcatcaccctgcaggatacattgaaacccaataccacttatacattcgattttggtgatgccatccaggacaataatgaggggaatcccttagagaattttttctattctttctctacgggcgaccgcctcgactctatggctgtggccggcacagtgctgaatgcggctaatcttgaaccggtgaaagggatgctggtcggcctgcatgccaatctgaccgactctgcttttaccaaacttccttttgagcgggtggggcgcacggacagtcgcggacgcttctctatccgtggagtggctcccggcaagtatcgcatctatgccttgcaggatgccgaccagaattttacctattctcagccgacggaagtgatagctttcaatgattccatcatcattccttccatggaagaacgcatgcgccaggatacgacctggatagactcgctgacagtagatacggttgtagaacgtcaatatacccactacctgccagacgatatcctgttgcgtgctttcaaggagctttccttctcgcagcgtttcttgaaggccgaacggttgactccggagaagttttcgctctatttcactgctccggcagacacgttgcctttattgaaaggattgaactttaatgaggaagatgcgtttgttatagaacagcctaccggccggaacgatacgattcattattggataaaggattccctgctctataagcaggattccctgaaaatgagtatcacctatttgtatacggatagcctgaaacaactggtgccccgtaccgatactttgaatgtgttggcgaagttgacatacgacaagcagcagaaacagaagcaggaagcgaaggaaaaggaacagaaagagcgtgagaagaaaaagaagaagttgaaagaaggtgaggtggaagagcccgagccgacggaattcctggctgtagatgtgtatgccccttctgcaattgatgtatatgattatcttactctgtcgtttacggaaccggtggcaagcatagataccgccgctttccatctgaaacagaaagtggactcgttgtggcaggatatcccgttcgactttatgcgcgactctttggacttgaagcgttataatctgtttgccgaatgggtacccggtgaaagctatacatttgaagtggattctgctgccatacgtgggttgtacgggttgttttccgataagataaagaaggacttcaaggccaagaagctggaagagtacgggcagatattctttaatgtgcatggagcagactctctggcttttgtggaactgctggacggtcaagacaaagtgctgcgcacggtgccggtggtggatgggaaagccgatttctattttctcaatccgggcaaatatggagcgcggctgataaatgatacgaatgggaatggcgtctgggacacagggaattatgccgagaagcgccagcctgaaatggtttactattatccgatggttttggagcttaaggcaaactttgatttgacgcaggaatggaatattaaggccaagtctctggataggcagaaaccggacgaactaaaaaaacaaaagccagatgaagacaagaaaaagcaaaacaggaacaaaaataaccgcagtggcaatagcagccgcaatagtggtaggggctatagctattaggcggaagcaattgttcgttctattgatggtgggagcagtctgtttgggagcctcccagtctgttcaggcccaatgtgctgcaaagaatgaagcttttcagtcgggcgagcacgtcatgtacgatttatatttcaattggaagttcatttggaagaaggtggggctggcaagcctcactaccaatgccacgacttaccattccgagcctgcattccgctttaacttgctttgtgtaggcagtaaaaagaccgattttttcttcaagatgcgcgatacgctaacttgttatgtcagcgacaagttggagccactctatttccgcaaagcggcagaggagggaagccgccatacggtggacgaggcctggttctcctactcggacggactggcgaatgtaaagcagagacgcacttggcacaatcccgtgcgtgaagctcaggagatggaatacagtgatagtcgctgcatcttcgatatgttgagcattttggcgcaggcacgctcctatgaccctaaagactacaaggtagggcagaagatactctttcccatggccacggggcgcagggtagaagagcagacgttgatttaccgcggcaaggaggaggtcaaggcgaataacgacaccatttaccgctgcttggtattctcttttgtagagtacaagaaaggtaaggagaaggaggtcatcaccttcttcgtatccgatgataagaaccaccttcccattcgcctggacatgtatttgaatttcggttcggccaaggcattcttcaagagtgtccggggcaaccgctatccgatgacgtctgtggtaaggaaaaagtgatgttatccccttttctaaatacactggattcgaaagtggcaatcagttttccctcctggttggtgacgtcgatctggtaatatccggtggtgcggccgatgtagcgttcgcgcgcttcggcatacagcacatcgcccggtccgctgctgcgcaggaaggtgatattggacgaaagagagaaggccaatgttccgtgggagttggctgctgctgccagtgccaggtcggcaagggtgaagatggcacccccttgcgtacggcctcccgcattgagatgctctgccgtgataaccaggcgtgccttgctgtatccttcctttatttctatcagttctacgcctgcattcgtggcgaagcggtcgttcttgaaaaactcttgtgcggtcatgaggggtaatgattaatgtttagtgattagtgattaatgggtggaaaatatgtgcttccggacgcaaaagtaacgattttagccattaattgaattatttaggcgggtcaaatctgtacgcttgccctacttttgcagcaggaaaaatcataaactcttaataaataaatcccttattatgaaaacagtcctcactacattgggaatctccctccttgtattggcaggttgcgcagggcaaaagcaggctgaaagcaactttatccaagaaaacattgataatgctgtggctcaggagacaattcagacagacattatcgagaaatctggtaaaatccttaatccccgcaccattgataaggatgggaacattgtctatgtacctatcgacgattggtgttccggtttcttccccggtaatatctggcatatgtacgagctgaccggtgaccagaagtggctgccgctggcagagaagtataccgaggatttggattcggtacaataccttacctggcaccatgatgtgggatttatgattggctgcagttacctgaacggataccgttttgcgggtaaggaagagtacaagccggtcatcatacagacggccaaatcgttgtctacccgtttccgccctgcagcaggcgtacttcaatcatgggatgcagataagggatggcaggctgaacgtggctggaaatgtcccgttatcattgataatatgatgaacctcgaactgctgttcgaagcttccaggctgtccggcgactccactttctacaacatagcccggaagcacgccgatacgactatggctaaccatttccgtgaggacaacagctgctatcatgtggtggattatgaccccgaaaccggtgaagtccgtaagagacagactgcacaaggctatgccgacgagtctgcttgggcacgtggacaagcgtgggccttgtatggctataccatgtgctatcgctatacacacgatgccaaatacctggaacaggctgaaaaggtctacaactttatcttcaacaacaagaatcttccggaagacttggttccctactgggatttcgatgcccccaatatcccgaatgaacctcgcgatgcttcggcagctgcctgcacggcgtccgccctttacgagctgagcacttatctgccggataagggatacaaggaaaccgctgaccggattatggaaagcctcgcttctccttcttatcgtgctaaggtgggtaccaacggcaacttcatcctgatgcactctgtgggcagtattcctcacggtgcggagattgatgtaccgttgaactatgccgactattacttcctggaaggattgatgcgtaaaagagacttggaaaaatgaaaactcaattaaatattttgttaggtggtttaggtttgttcgccttgcagggctgtaaagccccgcaggcagaacaatccgtccggccgaatgtcatttacgtttttcccgaccaataccgtaaccaggcgatggagttctggggccaggaaggttttcgggagaaagtgaactttcggaatgacccggtgcataccccacgcttgaatgattttgcccgggagtcggtggtattgacatctgccatgagcaactgcccgttgagcagtccccaccgtggctctctgttgacgggaatgtatcctaataagagtggtattccattgaattgcaattcgagccgtcccatcagctccctgcgtgaggatgctgtgtgtgtgagtgatgttttctgcaatgccggatatgactgcgcctactttggcaaactgcatgccgactttcctacccccaacgaccccgaacgtcccggacagtatgtggaagaccgcgtacctgcatgggatgcctatacatcgaaagaacgtcgtcatgggttcaattactggtattcttacggtaccttcgacgaacacaagaatccgcattactgggatacggaaggccgtcgccacgacccgcgcgagtggtcgccgttacacgaatcgggcaaggtggtgtcttatctgaagaacgaggggaatgtacgcgacccgaagaaacctttcttcattatggtaggcatgaatcctccccatagtccgtaccgttctttggacgactgtatggaggaagatttcaatctctataaaaaccagcctctggacagcttgctcgtccgtccgaatgccgactccaagatgctcaaggcagagagtgcacgctactactttgcttctgtgacgggtgtcgaccgtgctttcggtcagatacttgatgccttgaaggaactcgggctggacaagaataccattgtcgtgtttgcctccgaccatggagagaccatgtgtagccagcatacggaagacccgaagaattccccgtactccgagtccatgaacgttcctttcctggtgcgtttccccaataagattaaaccccgcgtggacgacttgatgctttcctcgccggacatcatgcctaccttgttgggccttgccggccttgccgactctattccggctgaggtgcagggacgcaactatgcaccgcttttcttcgatgaaaaggcagatattgtacgtcctaccggtgctctttacatccagaacttggatggtgagaaggatgcggaaggtatggtccgttcttatttcccttcatcgcgcggctttaaatcggcgcgctatacgctggcgctctacattgatcgcgaaaaccatacgctggtcaaaagcttgttgtttgacgatgaaaaggatccgtatcagatgaataacctttctttggaagaaaaccaagaagtcgtaaaagacctttgcgcagagatgggcaaagtattgaaagagattgatgacccttggtataaggaaggcatcttgaaggatatgataccttattgattggaaatgggttatagataatcctccataaattgtttgaacgttttttgcgacccgcttcgactgatagtgaactatttgtcggagcgggttgtttgattcagaatagaataaatttaccaatacgtatttaagtaaatgatggagatgaagtatagactatgggcttgtctgttgtttttgccgatggttctttgggcgtccgggcgtccgaaagtggctgtcgtactcagtgggggtggcgccaaagggacggcgcatatcggtgctctgaaagtaattgaagaagcgggtatccctatagattatgtggtaggtaccagtatgggggccattgtgggaggtttgtattctatcggatataccccgcagcaattggacagtatggtgaatgcccagaactggaaattcctactctcggatgcacccaatcctaaggatgtgttgctggacgaccggttgaagtcggagcgctatgtactctctattccattttctttgaaatctgccgctgtttcggatgcgggtatcataaaagggaagaacctggcacgtttgttctccacgttgacagaaggttaccaggattccgtggattttagccgtcttcctattccgtttgcctgcgtgtcggaaaatctggtgaatggtagtgaagtcgtgttccgtgagggaatactggccactgccatgcgttccagcatgtctattcccggtgtgtttgctccggtagacctggatggaatggtgttggtggacggtggaatggtgaataactatccggtagatgtggcgcttgccatgggggccgactacgttatcggggtggatgtgcagagcccgctgcttaaggcttccgagctgaaatcggtgaaagacatcttcgggcaaatcatcaatctgcaaggagagaagaaataccgtgagaatctgcgtaataccgacgtattgataaaggtggatgtcaccggctattcggctgcaagtttcaccaaagaggccatcgacactttgatggtgcggggagaacgtgctgccatggacagttgggacggactgcttgccctgaaacggaagctgggacttgcagacgattatcagcctcgccgtccgggacctttccgcttgcccggcgtggctgttgatagggagattcccgttgattcccaaatagccgtccctgctgtgcgggagaacaagctgaatgtcggttttcgctttgatacagaagaactggcggcgttgcaggcaaatacggacttctatttcggccggcagcgcgagtctctggtcagccttactgtccgtctgggcaagcgtacactggcacgactcggatatagttaccagtgggacggtggatggcaggcgggacttgcctatcagttcgactataaagatatgaatatttacaatgaaggcaaacgggcgctggatttgacttttacacatcaactggtccgtatgggggcggcgaaggactggaacaatatccaggtcagtctgggcattgactttgattactaccactatcatgatttgctgtcgctcgatccgttagcttcggcactgtttgagaattcgtccttattcagttactttgccggacttgtgttcaacaacttgaatgagaggagcgcccctacaaaaggcatgtcgtgggcggtatcctatcatctctatacggataacttcttccagtataaggacaacaatcctatttctgttttcgatgcccgttggcagggatgtttctctccctcgagtaagttcactgtcactccttcgttttatggacacgtattgtccggaagcggtaattatccttttgccatcattaatatggtggggggaaccataccggggcgctatatgccacagcagataccgtttacgggcatcaaccgtgcggaactgtcacaagccgcactgctggttgcagggctgaacctcagacagcgtatcttgaaaaaccagtatatatcagtgatgggcagttatgggcgaaactccgggaagtttcatcagattcttgactcttccaaatcggctgatatggcaggggtaggcatcggctatatgtacaagagttttctgggaccagtggagatacagttgaactggtctaatcagacgaagaaactagggtggtatgctgggttcggattcgtattctaacgaggatatatcaaaatattacatggattttattttcagacaaaagaacagaagaacaagagaaaaatatattcttttgttcttctgcctaaaacttaccccaatctgtatgattctgcggtgagttatgatactttcattatttattcagcttccattcgcttccgtccttaccgtctttaatctcgaaaccgagtgcggtgagttcattacggattttgtcggatgtggcccaatctttgttggcttttgcctttgaacgctcttccaatagcatgtccactactttgccgaaggcggcttcacgctcttcgttggaggcgttgtcttcttgtaatcctaagatgtcgaagcagaagaggtggaaggtttccttcaattctttcaggtcttcggctgtgatggaatcgtttccagccaggatattgtttaccatcttggcgccgtcgaagaggtgggcgatgacaatcggtgagttcaagtcatcattcatggcttcgtaacacttggcacgcagggatttcacatctatggtggaggttgcagcaggggtaatcttgtccagtccatgtacagcatccatcagccttgccaatcccttttcggcggcttgcagcgcttcgttgctgaagtctaccgtactgcggtagtgggcttgcagggtgaagaatcggatggtcattgggctgtaggcttgctccagcatggggtgcgtacctttgaagagctcttccaatgtgatgaagttaccgtaagacttacccattttctgtccattcacggtcagcatgttgttgtgcatccaataatgtaccatatcttctccttgggaagctacggattgtgcaatctcgcattcgtgatgcgggaagataaggtccataccgccaccatgaatgtcgaagtgctcgcccaagtatttctttcccatggctgtacattcggcgtgccagccggggaagccgtcgctccacggggaaggccaacgcatgatgtgttccggttgcgcacatttccagagagcaaagtctgcgggattgtgcttctcgctctgtccgtccagttcgcgggtggtgttgagaacatcatccaggttgcgtccggagagcttgccgtagtgatggtccttgttgtatttttctacatcgaaataaacggaaccttcactttcataggcatatccgttcttcaatatctcctttacaagttctatctgttcgatgatgtggccgctggcatgtggctcgatactgggagacagcacattcaatgcatccatcgccttatgatagcggttgatgtagtactgtgccacttccattggttccagttgttccagacgggcttttttcgcaatcttgtcttcaccttcgtcggcatcgtgctccagatggcccacgtcggtaatgttgcggacatagcgcaccttgtagccgatgtgcgtcaggtagcggaacagcaggtcgaaagtgatggcagggcgtgcatgtcccaagtgcgggtcaccgtacacggtcggtccgcagacatacatgcctacatgcggtgcatgcagcggtacgaacagctctttttttctatttaaagtgttgtaaatggtcagttgatgttccataacagttgattattagttcttttaggagtacaaaggtataataaatctgtgaaaatctataatgatattctgttttataagagtaaatgcaacggatttcaccttcgtttattacttttgtatccatgaagtcagataaacgtgtattgcttggcatgagtggcggcacggatagctccgtggccgccatgaggttgcaggaagccggttatgaggtgactggcgtgactttccgtttctatgaggcaggagatgagactgggtatctggaagatgcacgggctttggccctgaagctggggatgaaacacattacctatgatgcacgcgagcttttccgttcgcgtattatccgctattttgtggaagagtatctaagggggcgcactcccgttccttgcacggtctgcaataatgagctgaagtgggtgctgttggctaaaatagccgatgaaaagggaatttattggatttctaccggacattatgtgcgcaaggtcttgtccggagcaaagtattatatagctcctgccgcggataaggacaaagaccagactttctttctatggggattgaagcaggacatcctgcagcgtatgttgcttccgatgggagatattacgaaaaatgaggcgcgctcgtatgcggcggagcgtggtttcgagcaagtggctgcaaagaaagacagtatgggggtgtgcttttgccctttggattaccgttcctttttgaagcgtgaggttcctgaaacactattatccggtaaaggtagattcgtcgatgaaaagggggatttcttgggatggcatgagggctatccgttttataccgtagggcaacgtaggggcttaggtatccatctgaacaaggctgtttttgtgaaagagacaagagtggaaagcaatgaagttgttcttgctccactatcttccctctacaagcaggaaatgtggctgggagagtggaacctggtggagaacagccgcgtgctgggtgcagacgaggttattgtgaagatacgctaccgtaagcaggcaaaccactgcaaggtaagtcttacagtggagggactactgcatgtccgcttgatagagccgctcgaatctattgcgccagggcaggcagcggctttttatgatgaaagcggtctgctgctgggcggtggaattattttgtgataaaatctgcttttatattttgttatttattaagcttcagcatttcttctatgtattcccttgtgttgctgagtcggggtactttatgttgtccaccgagtttccccttgctatccagccaatcgtggaagaggttgggacgggcgacgatgatttccagtggttgcagtgccaggttattctgtcttttagcttcatagtcggagtttacctctttcagggtgtcgtccaatactttggcgaacttctccaggctgtccggcatttgtgcaaattctatcagccactggtggcggcatttagcattccggtccataaagactggggcggcagaataatctatgacccgtgcatcggtttcggcacatgctctggcaagtcctctttccgcattgtccacaatcagctcctcgccgaatgcgttgataaagtgcttggtacgtccggtgatgacgaacttatagggattcttcgatgtaaacttcactgtatccccaatcatatatcgccataaaccggcagaagtggagattaccatggcgtagttcttgttcagttccacctcttcgaggcagaaggtacgcggattctccttgcctacatcttccagcgggatgaactcgtaaaatataccgtagtcaatcatcagtaacatggcaggatcggtagggtcgttctgagttccgaagtagccttcggatgcattgtaagtctctacataatgcatcttgctgctgcggaccacgtctttgtattgctcgcggtaaggagtgaaggcaacgccgccgtggaagaacacctccagattgggccatatctcctcaaggctctgctttcctgtcttttccaatatatgtttgatgagtacaagcatccaggacggtacaccggaaaggttgctgacgtttgcatggatggtttcgcgggcgatggcctccattttgggctcgaagtgctccattagggccgtctgcttgctgggtacgcggacaaagtttaccagcgggttgatattttctatgaggatggcggagaggtcgcctacaagactgtggttggtgttcaggttgggagcgtggctgcctccaaggataagccctttaccggaaaagaaacgactttcgggattctgtcccagatagatggcaacggcatcccggcctcccttgtaatgcgtgtcgtgcaaggactcccggctgacgggcaggaacttgctcttgtcgttggtggtacccgatgatttggcaaaccaacgtatttccgaaggccaaagcagattctgctcaccggcacgcaggcgggttacataaggctttacttcttcgtaagtttgtatgggaaggcgcttcttgaaatcttcataagtacggatagaggtatagtcatacttctttccccattccgtatttgccgctgtccggatgagacgctgcaatacaagctgttgcaattcacctgcatggctggtgtattgttcgatttctttcagacggggagcaaaatataccttattcagaaactttgtaatattcatcgttctttgtgaaatcttattttaaaccgcaaaagtaatcttatttatcggcatctctatcttttttctcttttttttctatctttacggacctatagaacaataattcaaacaaaaatatcatgagaataggtattttgacttcagggggcgactgtcctggcatcaacgctaccattcgcggtgtatgcaaaacagctatcaaccattatggaatggaagtaattggcattcacagcggttttcaggggctgctgaccaaggatgtggagtcgtttaccgaaaagtccttatccggtttgctgaacttgggaggtacgatgctcggtacttcgcgtgagaagccctttaagaagaacggcgtgatgtccgacgtggacaaaccggcactgatagtgcggaatatcaaagagatgggacttgattgtgtggtctgcatcggtggaaacggtacgcagaagacagccgccaaactctccgctatggggctgaacatcgtatccgtgccaaaaacaatagacaatgacatttggggaaccgatttttccttcggattcgattctgccgtcagtattgctacggatgccatcgaccggctgcacagcacggccagctcgcacaaacgggtgatggtgattgaggtgatggggcacaaggcaggttggatagccttatactccggtatggcgggcggtggtgacgtgattctgattccggagattccctataatatccaccgtatcggagagacgattctgaatcggctgaagaaaggaaagccttactccatcgtggtggtggccgaaggcatacagacggacgggcggaagcgtgccgccgagtacatcgctcaagagatagagtatgagacgggtattgagacccgcgagactgtgttgggatatatccagcgtggcggctcacccacacctttcgaccgtaatctttccacacgtatgggcggacatgccacggaattgattgccaacgggcagttcgggcggatgattaccttaaagggaaatgaaatagcttctgcaccgctggaggagattgcgggtaagttaaagctggtgacggaagacaatgacttagttgtccaaggacgtcggatgggaatctgtttcggctaatctttcttgtgaggatttttcaacagcttctgccatgggattatcttctgtggcggtttctgttgaatggtttcgctctttggctgcctggacttcctccttgaaagcggcatccttaatttttttcaatgccatttgtgccgcattttgttgcgactccttcttggaataaccggtgccggtgcctgccgatatcccttcgatgcggacttcggtgtggaacatcggattgtattcttcgtcgagaaactgttcgataagctcgaatgacacttccattttgttcttctggctccattcgatgagttttgacttgaagttgacctctttgcgagacatcttgtcgaggtcgatatagtttttgaaaatcttctcttccatgaactgcttgcagcggtcgtagccctggtccagataaatggctccaatgaaggcttcgaatgcattgccgtacatatagctgttgtgggacgaggagcgggtggagtatttcaccagtttgtccagtccgatttccacggccagtttgttgagtgtttcccgctgtacaattttggaacgggtgttggtgaggaaaccttcgcggcgtccttcgaaatggcggtagacaatatctcctacaatggcgtcgaggatagcatcgcccaagaattccagccgttcgttgttgatgggacgtcctttttcggagcgcatggagatggatttatgcagcaaagcctgctgatagaccttgatgtcacgtggaaagaagccgagaattctgtaaaaacaaaaataagactctctatccttgcggaacaagagccttattttatctatttggttacgtaacacgaccttattattctgcgtatttcttgaaaatgacacacgcattatgaccaccgaatccaaaagtattggacaaagctacgttcacttcgcgcttttgtgctttgttgaacgtgaagttcaggtcatagtcgatgttttcgtcgttatcaccctcttcgtggttgatggtcggaggaacaatgccattcttgatggcgaggatgcttgcaatggattctaccgcaccggcagcgcccagcaaatgaccggtcatggattttgttgaactgatgttcaactcatacgcatgctgtccgaatacctctttgattgcttttgcttccgaaatatcacctacgggagtagatgtaccgtgaacattgatataatctacttcttcgggtttcatttctgcatcttccaacgcattcaacatcactaacttggctcccaaaccttcggggtgagaggctgtcaggtgatgagcgtcggcagacattcctacgccggcaacttccgcatagattttggcaccgcgtgccttggcgtgttccagttcctctagaacgagacaaccgccaccttcacccatgatgaatccgtcacggcttgcgctgaacggacgggatgcagtttcgggagaatcattgcgggttgacaatgcatgcatggcattgaaaccgcctacaccgcaagcggcgatggcagcttccgaaccaccggttacgatagcattggccttacccagacggatgaggttaaacgcatcggcaatggcatttgtggaagtggcacatgcagaacaagttgcgtagttgggaccatggaaaccatacatgatggaaatttgtccggcagcaatgtccgaaatcatcttggggatgaagaacggattgaatttggggccgttttccttaccggtcagggcatagttgcccgcctcttcttcgaatgtacggatgccaccgataccggcgccgaagatgacaccgattctgtttaaatcctcattttcgacgtcaagcccagagtcacctaccgcttctttggctactgcaatggcatattgtgtgtacaagtccatcttgcgggcctctttgcggtccatatatttggtagcatcgaagccttttacttcgcatgcaaactgagtcttgaaaagcgatgcatcgaaatgagtaataggtcctgctccactaaccccattcacaagattttcccagaattcgggaacactgttgccaatgggagtaatggcgccgagacctgttactacaactctttttaattccatgttataaacgaatggataagattacttagcgtgttcttcgatgtaagatacagcatcacctacagtaccaatcttttcagcctggtcatcgggaatagagataccgaattccttttcgaattccatgataagttctacagtgtcaagagaatcagctcccaggtcgttagtgaagctagcttcgttagtaacttctgattcttctacgcctaatttatcgacgataatcgctttcactcttgatgcaatttcagacataactttaagtttttaattaataattagttttatttctttaaatttgcggtgcaaaggaatgaatatttatcattcctcgcaaatatttgatgaattaaatgcacctttttgcacatttttcacggttttgtgcagtgattggagggattatgggaaaaaatatcgcagttttagcgtcgggaagtggtacgaatgccgagaatatcatccgttatttccgggaaaaaggttcggcacgtgtggctctggttttgactaaccggcagaatgcgttcgttttagagcgtgccaaggggctgggagtgccttgtgtctggtttgccaagagcgattgggaaagtggagagcttattttgtcgacgcttcgagagtatgatattgattttgtggtattggcaggattcctggcacgtgtgccggacaatattctgcatgcttatcccaataaaatgataaatatacatccttcgttgctgcccaagttcggcggaaaggggatgtacggcgaccgtgtgcacgaggcagtgattgcttccggcgaaaaggaaagcggtattaccatccattatacgaatgagcattatgacgaaggcggaattatctgtcagcagaaatgccccgtactgccgggcgatacgccggaggagctggcgcaacgcatccaccggctggagtatgaatactatccgaaggtgatagaggagttggtggaaggcctctctcccagttatttatagaatcggttaagggagaggatggcttcgttcagcttgcggttgtctatcttgtagttttccaggggattcaatgcactgtcactgatctctatatatccggaagggtgtttttctagaatagtatgattttctacgataaaggcataattgagatggtcacccatgatatgccagttccgtggacaagtatcggttattaaatgccccatactgtaatcggaaggcggattggttacacccagcactttattcattaaggttggtgcaaaatcatagtgcgtggtacggtgatggtaagtatgtggctgttctcccggttcatataataggaaggggatatgtgtttgtaccggtgaataattactgccgtgaccccaataatttttatgattctcattgaattcttgtccatggtctccggtaatgatgaccagggtattgtccagctgtttcttttcctcaagtttgtggaggacgcatcccaccagtgagtcggcttccgccacgcagttgtagtagaggttcaggaaaggagtagggtctatgtcgttgttcagtttcatatagtcggcgaactcccaggacggttggaaacgataaagcttgtccttcggcacttcatatccgtgtgccaaatcatagaagagaaaggaaaagaaaggttttgtaccgctgcccagcgtatcgagtgcttgcagataatctgctgtaatacggcagtcgcggtcataaacggtttttccttcggtatgggtacgcaagtcgggtacctttgagaaaagtattttggcaaatggcgggttgacgattgtagcactgggataaatacctatctgataattctgcttcaatagttcttctatgagcaggggctgtatgcccgatacctcaaaatcagtccagtagatggatgagagactgaagaaaagcccgaagatacttccacgtgtgccattgctgctgcttagatgggaggtgaatctgctgcaactgtcggcaaagtggctgatatgaggtgtaatgtcctggttaaaggcgcggtagttccatgagtctatggctatcagcactacattcttggggttggaatggacttcgtatttcaaagaatctatcggatagttgaggtcagcagactgctttttgttgttgaagttcattttaatgacatccttggatgagaccactcctaacttcatcatcaggcgggttgccgtaagcgggaagtaatagggcaggcagggggcgctgcgaatcactgaagtcttttgcgctacagcggcataggcatgataaaagttagagaatagtgcaaacaaaatcagagtggcaagtacaggacggaagccacagcggtgaaagcgggtataacaatggcctgcaagtattcttagcaaagtattggcggcaaatatacccactaatactcctgcaatcttcagataaagccagaagctgaatgtgaaaatctcactgttgccctctccaaccaggagattcagtacaaaaccattgatatggaacttgtaaagactgtacacactgccgtctatgtaagcaagtatattgagtaatgatacaagaataatgtgtgtgatggcggcggcttgatggcgccggacggtaatggctacgattaaggatacgatataaggaataagtgcccacaaggcggcatgtgagcaagcggccgttatataaaacatccagcctcccacgtccatcatggcgagccggggactgtgaatcagataaaacagaaattgtatggcaatcgtcagagttgaaattgcataaaaataaatccttcactgagtgatttctctaactgtattttttgcattgatattgtaatgttttgcctatagtttcctctgattcggcattgatagtaaaggcgtgaggagcttatatagtgacgtcttttgtattatcgggctgtatttctaaatgtatgtgctactttgggatataagtgtaagcatctttttctcttcgtagcgggtagtctccccgcaatttttcaaattgttcgggatgtgttttcagtgcttcgctgtcccttctcgggtcatacatttgcagatatgcttctgccaggttgccggcggtaataatcgggttccggggttgggggggagcgatgcggtagtcggctttgatgtgaaagaaacggcaaagggcatccagggacatacgggtggcattggcttttccgtcggctgaataaccggctatatggggagttccaaggaacactctatttaataaggtaagattgatatcaggctcattctcccatacatcaatgatggcatcggaaatcagtccgtcttctaaggcattcaggagcgcattggtttcaatcacctctccacgtgaggtattgataatgacgggacagcgttttaatgaccggaagaaagtatggtctgccaaatggaatgttttgtatggcccttccttatataaaggtacgtggaaggtgaggatatcacattctgctgcgagtgcttgcaaggaactgaaatcgctctctccttccttgtcttgccggggcaggtcattcttcaggacacgcatgcctagttcttgccctacttgggctattttgctacccacattgcctacgccgatgatgcctaatgtcaattcggacagttgtactcctttgagttgttgcaataatagtaaggctgattgcacgtattgagctacggatgctgaattgcatccgggggcattggtccaagcgatgcctgcttcacggcaatattccgtatctatatggtcgaaacctatggtggcggtagcaatgaagcggactttactgccttccagcaattccttgttgcagcgggtgcgggtacgtataatcagtgcatcggcatcttttaccaactccggagtgaagtctctgccgggagtataaatcacgctgtcggctattttttcgatggcttccttaataaaaggtatcttgttgtcaacaatgactctcataatgctgctgttcttttcgacgattctccatcgtgcgaagatacgactaatccgtcaaagtggctaagtaatgcccggaaaataattcggctttttccgttttaagtttgcatttctgccctcaccgctctcactcttttcttcaacttccctattcatcggcattgcaggggtgggtgagagcaatcgaaaagggtgagggtaaattttgctctcacccgtgttttcttccgttccgcatccttctttcttctgttgcatccttttcattctttcgttttacttttggattcttcagcagcccacgttagtgagccgtgatgttcacttgagtgaactaaatagctcactagtgtggttgaattggttcataacagtgggccgatgatgaataaagtagttttcgggaaggagataaggtgtttgaaggataaaacaatgggccagtacggattgaacaatggggatgtgcccgattccgtacttggtttttgtaacagacagcaagtgattgctcatctctatcttatgttttataggtgaatttgtgtttttgtcaaaaaaggaaagcgaaatagactgctatatgaggattatcttgtacatttgcagctgaaactttttagagatgagaataggatacgacggaaaacgggctgtgcagaattttacgggattgggcaattacagccggtatgtggtgcagtcattgtcagcctttgctccggaaaacgagtattggttgtatgctccggtacaccgtgaaaatcagcaactctcgtcgatggtggctgaaagccggggaacggtatcggtacattatccgtcttattggctctggagaggaatgacttcgttgtggcgtgtgggaggcatacgcaggactttgaaacgggacaacatacagctgttccacggattgagtaacgaacttcccctgactatccatcgggtacgggaagtaaagagtgtggtgactgttcacgaccttattttcctgagactttcacattgtttttcgttggtcgaccgcttgatttataactacaaatgccgctatgcatgcaagcatgcagaccacatcattgctgtgagtgagtgtaccaagcgtgacatcatacattattatggaattcctgcggataaaatttccgttatttaccaagggtgtagctctctgtatgcctgccgtgtcggtaaggataagcgcaaggaggtgatgcggagttatcggttgcccgaacgctatatcttgtcggtgggcaccattgaggagcgtaaaaatgcgctggccattgtgaaggctttggagtatctgcccgatgaactgcattttgttctggtagggagacccacagcctatatccatcagctgaaagagtttatgacaaaagccggattgcaagacagagtacattttctgcatggtatcccttcagacgatttacctgccatttatcagtcggccgagacttttgtatacccatccgtttacgaaggttttggtatccctattcttgaggctttgcattccggcattccggtggttgcagcaaccggctcttgccttgaagaagcgggggggaagcattcattgtatgtgagtccccacgatgtggagggattggcagcggcgattgcccgtacacaagagccttctttgcgtgccaccatgattgaggagggattgaagtgggcacagcgtttcacgcaggagcagatggcgcgtgaaacgatggagtgttatcagaaagtattaacaaaagaaatctaagatatgaattatttggaccgcaatgagtttaactacgcaccttcgcaagaggtggtggaggctctaaagaattttgatataaacaaactctgtttctatacccgtatctacgacgaaggcaagaagagtattctgtccgtttatctgtccgagacttacggaatcgatgagccgcaggtgctgttgggttatggtggagaagatatattgaaacaagcagtccactatttcctgacccaagaggatgggaacaagacgatgctcattcctaaattctcgtggtggtactataaatccattgctgatgaagtggacgggcatacgttgcagtatccattgtatgaggatggcaatacctttaaatatgatttcgctgccatgaaagagatggtacagcgtgagaatcccaaggtcttattaatcgcttcgcccaataatcccaccggtaacggtctgacccccgcagaattggacgctttgttggctgagttgcccgtaacaaccatcgttttggtggacgaagcctatgcctctttcgtatctactgatacggactatattaaaatgctggttgataaatatcccaacctgattatttcacgcacgctttccaagttctacggattgcccggattgcgcatgggttttgggtttatgagtaaggagttggccagctttggcaaatacagcaacaaatatctgggttataaccgtatctctgaggatattgctattgccgcactgaaatcggatgcgcattaccggaatatagcacggctgatgaatgagagtcgtgcctgctttgaagcggagatagggacgttgcctggtttcaaggtatatgagtcggtggcgaactttgtccttataaaatatccgattgtcttgaaagaacgtttacagaaagcttttgccgacgaggattataaggtgaagttcatgaatgaaccagacatcaatacccatttgcgtattaccttggggcgccctgaacagaaccgtattgtcattgacaccattaaaaaaattgcattacaatgaaagcggttatattggctgcagggatagcttcgcgtttgcgtccgttgactgataccactccaaaatgtctgttgaaagttggagagcgttgtttgctgcaaagagcctttgatgcattgctgcagaatggctttcgggagtttgtcattgtcaccggttatagacagcagcagattgtggattttctggaagctcattatccggcattggaggttacgtttatctataatgagaaatatgcttctaccaataatatctactctttatggcttacacggccttatgtagataaagaggacattctgttgctggacagcgatatcctttttgacccgcaggttgtagccaagttgcttggatatggtcaagcggatgcgttggctctgaaccatcatacattgggggaagaggaaatcaaggtaatagcggacaatgatggcaaggtgttggaaatcagtaagacgtgctccatatcccgagctattggcgagtctattggcatcgagaagatgtctgccgcttatacagaagcgcttttccgggaattggaggttatgattaccaaagaaggtttggataatatcttctatgaacgtgcttttgagcgtctcataccgcaaggacactctttctatgcgcttgacactaccgaatatttttctgtggagcttgatacggtgaatgactttgaacaagcacagcggttgattccttcacaactttattaattaatgggctgatttttatggcagattatgatatacgtcctttgcagcttcgtattttgaagatattgcttgctgtggataaagtttgtaaagaacatggtttgcgctattatataatggccggtactatgcttggtgcagtccgtcataagggatttatcccttgggacgatgatttggatatcggtatgccgagggctgattatgatttgttgatgtctcattccaaggaatggcttcccaagccttatgaggctgtctgcgcagaaaatgatccgaattatccattaccttttgccaagatacaagatgcggatacgactcttatcgagcgtatgcatttgaaatacttgggaggtatctacttggacgtatttccattggatggtgtaccgcaaagcaacctgaaacagaggattcattttgctcggtatgaattttacaagcgggtgctctattttatctaccgcgacccttataaacatggaaaaggtcccggctcatggttgccgctgctgtgccggagactttttactactgccggcgtacagaggagtatcagaaatgtgatgaccacctatgactttgacaagtcttctttagtctgtgattatgacgacggtatgcgcggtattatgcccaaggcagagctgggagctccgactcccgtttcgtttgagggcgaaacagtgtggggagtacaagattatgacgcctatctgacccgaaaatatggagactacatggttataccgaaacaaagcgggcagagacagcataatttccactatttggatttggataagccctattcttcacaagaaagttccaattctattttataattttgctcttttagggaaatgttagacaaatgtttttttccaaaatttccataagggaccgaaatctttggttaataaataaaatatggcttttaggcggccgcgtattaggcttattttgaatctatttcctgttttgaaagttcctatcttttgggatttgaaatcttttcctttgtaagtgaaaactttgcggaatgtggatgaagtcatgccccattttaatagaaattgcatttgaccacaattcttgcgtatgcgggtagttgattttgtttcaaaatgatagatgcgactggcttgtagccctttcatgaatctgactccacacatatataattttgcggtgaaatctgggtcgctgtacattccgggtgagtattctatactataaccgcctactaaatcccaaatgtcccggtgtacgatattgggaggaatggtagctcccatccagtcgtttattttgtagttcatgtattctttcagtaatttatcttcttgaaaagtttcgatactgtctccataattggctaagatggttgatgcgctttgtgtatgtggttgtattgatgtagctgaaagaaagaaataattgtcagacagtttttctatttcgtcatagagaaccttgtcccaaaaagggagtacatacatatcatcattcaaaaatagaatataatcagttttgactttagtgcgcatcatattcatagcaaaacatactccgatattctgctcagaatgtgtgtaatcaatacctgctttttttatccactctaaggttccgtcacttccatcgtttacgtgtacaatgatttggtgattgtagtaagagtttctttggatactttgtatgcatagttttaggaaagtaaggttattccatgtaggtataacgattgaaaataatctgttttgagattttatagctgtcatcttttgctaattgagaaaataagtacaaagatatttatataaatggagtttttgattataattacttgaaaacatttatattttataatatgcaaaaacaatattggtgtgaaatatactgttttatgagtgatatataatacctctagatttcttgtagacaatagtttggacttggattgaatttttatgtttgtgttttgtgtaggctgatgttctatattgtatgattagcctatatcgctatttgcgaaacttgaattaagttattacttttgtgccgaatcagcaattctaataaatttgttatgaccaaattcttaattatccgtttcagttcgataggggatattatccagtgtatgggaattatcggtggaatacgtgaacggtttgcagatgtggaaattcattggattacccggaaagatatggtggggaccttgtcgatggatggcaggattgataaaatctgggcgtttgacaaggagaccggacttgccgggttgttgaaaatggcggctgatttgagaaaagagcatttcgactacatttatgacgctcatagtaatatccgttccaacatattgaagctgatagtgtctccattgccttttgtgaaaccttacgttgctctgcggagcaaagagagaggcaaacgctttttgttgttcaaactgggaatcaaccatttcgacaagcctttcagggggatggtgtcttttcagaaaccattgaagaaatggggaattacgcattttccggacaactatcacgactggcatttcccgatgcaaatacgtagcaagtatgagaactttgtaaccaaagatatgattacgctggtgccgtctgccaactgggaaatgaaacgctggcccgtttcctattggaaagaattggttgcccttcttcctgagtctagatttgttattctggctggtccgaaggatactttctgtgaggaaatcagaagtgctgcaccggaacgggtagttaaccttgcgggacaaacctcattgatggagtcttcttacatagtgttgcgttccaatctggtaatcagcgctgatacgggttttatgcatgccgctgatttgttccgtgttcctgcttttgccttgatggggcctacagccttcggtttccctacgggacctacggtggaaatactcgaaacagccctgccttgccgtccgtgcaccaaagacggacggggtaaatgcaagctggctgtttatcagaagtgtatggtggatattaccccccaacaagtcgctgaaaagattattgcttctcttggttgatggcgcctatcgtctttgtagtggaataaccgtctacgaaagggatagttactgtttcttgggcgtactccctgcctacaatgttttctatggcatagtcgccaccttttaccaacacgtccggtgcaactgtcttgatgagattcagaggggtgtcttccgtaaaaatcactacgtagtccactgcttccaaggctgccaggactgtggagcgggcgttttcatcattgatggggcgcgattcccctttcagacgttttaccgagctgtccgaattcaatcctacgataagtacgtcccccagtcttttggccttttccagatagcacacgtgtcctttgtgcagaatgtcgaagcagccgtttgtgaatacgattttgcgctcctgcgcacgcagttgttttatagtatctgcaagttggggaataggaataagtttgctggccggtttcccgatttgtagctcgtcctgcaactctttgaacagaatggggctggtgcctattttcccgactacaatgccggccgctttattggcaagataaatggcatctgcaatagggataccggctgccagcgcagctgctaaagttgccacgacagtatcgcctgcacctgaaacgtcatatacttcccttgcttcggtaggaatgtcttgtgaggcttccggagctatatatgacatacctttttcggaacgtgtcactaatagagaagtaaggttatactccttcagtatccggtttgccgcgttatgtatttctttatcctcatttctcacatccattcccgaaacggctgaaagttctttcagattgggggtgatgatggttgcggaacggtatttctcccaatttgtccctttggggtctataatgaccttcttcccttgcccggcagaggcggatataacctgctggcatactgtatcattgcatactcccttgccataatccgaaatcacgacaatgtccacttcggggagtgcacgcttcacggcatccagcaatttctgctcagtctcttcgttcaggcattcattttctgtttcaaagtccagccgtactacttgctggctgttgcctattacgcgggttttggtgatggttgggtgttctgtatgaaacagttcgtttctgatacccaaatcagcgaacatctcctgcattgtgtttccgttgtggtcgttgccaagcaggctgacgacatacggcgagcaacccagtcccaacagatttcttgcaacattggccgctcctcccaatacattgtaggtacgggtgacacggaccactggtacgggtgcttcgggagaaatccttttcacgttccctatatggtaagtatccagcatcacgtctccgataacgagtaccttctttccctttatactgtttaattctgtattcataataggttgttttttaattggttggcccaatatagaagtgaatgctcagaggtgacccggaaggacttgacaccacttctttcgccgcattccgtatccgatttcttatctccgaacatataggattgggatgggtcgatttcatatttcttcatcgcttccgtcaccatgaaaggagaaggcttacggcattcgcaatgttcttccggaacgtgagggcaagtatagaaatcgttcagtataactccatgtttttccaactcttgggcgagtgcctggttgaactgttcggcgtcctccagtgtaaagtagccacgtccaataccggattggttcgtgatgacaatcagcagataacccaattcctgaaaaatgcggagtgcttcggctacaccgggcaataattcaagctcttgggtcttgtaaacgtagccgaaatcaacattgatggtaccgtcccgatcaaggaaaatcgctttattcatgggagaacagtttattgtcaacgatgccgcacaagatatgtccgataattatgtgcacttcttgaatcctggcagattcggcgtgctgtataatcaacgggtaattgcaaagttccttgcaccttcctccatcccttcccaggagtcctatggtggtgatgcccatagattgtgccttctgcaaggcatgctccacgttgggagagttgccgctggtagaaaggcctatcagaatatcacctttcgttcccaaggctgctgtctgccgttcgaagacgcggtcgaagccataatcattgctgactgcggtcaggatggaagtgtcggttgtcatggcgatggcgggcaggccttcccgttcggtcacgaaacgtccgacgagttcggcagcgatatgctgggcatcggctgcactgccgccgttaccgcaaagcaagactttgtgcccttgtcgaagggcttgtactatcagattgccgacagtttcaatgtcggcaagcatttgccggttgttcaggatattttctttgagcctgataccttcttggatggactgggtgatataatcttgcataattttctaatctcgttggtacaaagatacgacatttcagaaatgaagcttgcttttgacgaaatttttaaattgtctttgctttctccatttcagtctgctgaagagagtgaagaatatgcattcttcaatatcgaatcctctttgctcggcatatagaggtattattttcatgaagtcatcggcgggaatacccagttggctgaaggcattcatggacattctgataccgggcactttaccgagcttcaggcggttgatgtcaatgagggcgaagtgatatttgccgtttgtcttccggtaaaatatattcttgggattatagtctagtggcaagaccttgttcagatgtaattggagagtgaagtctacgaggtcatgtcttagccgttttttctcttcttcctccatttccataccgaacatatccgttacaagcgggtaggggaggtattcggaaataaagtatccggtgtggaagaaaccattctttttgatttctatataagctaccggaggggcggtctctattccccgttgcagaaaaagttctgcatattcaaaggcgcgctgcgctttgcttttgcgaaaccaagtgtaaatgagacagtttatgagggcaggtcttttgtattttttgattacgaagtccttgtctccgaaccgcactctttcgactgtgtttcttcggttacaataaacctcttcccgttcatattcttccgatgggatggctcggatataactctcgtaggcggcataatgcggatgaatatgtaccttcattgtttttatttacattttacttcttttgaacgatgcaaagatagtgcaaaccgaaagcagaacaaaatgaacttgttcattttttattttgaggtgccgcttatcttcgcttttgagcaaagataatcaaaatgtatcatctggtcggaaatatcgtatgctttttgggcgaactcggcttctgccggggtgggctcttcacctaccacctccatttgggggctgatggcgaatcctttcttgcatgggtcgaggatgctttggcccaatccgctccagtagtaatcatccagttggagcaggttcagcagggtggggtacatatcgatttgtcccatcactttatcataacgcatgcctaccggagagtttactatgatgaaaggggtgaatgtcttgtcggatacgatacccttgccaccgggggcgttgcacaattcttcacggtaggtagccagtccttcgtggtcaccagtgatgacgataagggtctcgtcgtattgtgggagtgttttcaggtactctacgaattttcctatcgccttgtccgtatagcgtgcagtggtcatgtagtcattcattttctgtggaatggccggagagaaatgaatctctttcaattcttctggcaatttgaagggagcatggccggagtaggtcaccagctgcatgtaaacattctcccccttcttccagatttcccccttctctattttttggcggcattgcgccaggaaggagccgtctccggtacgtttgtgcgtgccaaaggcttctgtcagttcaaagtcatgataagcaatgatggtgtcggtcccgaaactgtaggctatgacgccttggttccaggtcgatactttatcaatggtcaggaggtagttgcgcgagttcttctgctgatgcatggctttctgcagggttccgtaggtgtggtcaggatattggctgctgtatgtgccgctgttgataggcagcataccggcgcaaagcaacagctgtgcatcaatggagcgccctcctttcacttgcgttagtacgtggggagcgtataaggtggtggagtcttgcagcagtttgttgagatatggagtaatctcttgcccttccacttccctttcgagtacccagctttccagagattctgccaggatgacgatgcagttgttgcggattccgatacgtccggccaaagggtgatgtccgggtttctggctcagccactcctttatctcttgctgtatctgtggggtggcctcctgcttctggttgatgaggtcatagcataggcttccgaagacggtatacatggaagtggtgcttgcacacagataggctttctggcggacggtgttgtatgcttccttgaatcctcctttggccagggtggtgatggcaaacagcaggataccgattcccaaagcccctccgtaatacttgtatgatgttcttccggcggtatttcttttgtaatgccaataaagggggatactggcaatggtagatagagggaagaagatgtcgtaccagcggaaagagtcataaacgcttccggtgaaatcggctaggtttccagaaagtccatagctgttaagtggaatggcagtatagtaggtgcggaaatacatcaggttgacaatcagtagtatatccagcaaaagcatgatgactatctctgttttccagaaccggaagaacttataggggacgagaagtacgagggtggctattattttggtcgcataaaattcgatggtagagaatgaagcgaatgtggtgggtatgctccagatgaaatcgaatagcaggaatttgaaaaaaatggtgattccgaataaaagagtcactttatctgttgctccttgttggctgttggagcaatgaaaaagatttcttctcataaaatagtacttttaaaatagtggggtgcaaagatagatattttagagaagaaaaagcttcataaacagcaacttttggagaaaagttgataaaagtcatttttttttctggattgatgcagtatatgcagaattcttgtatttactttgcagacgtttaaagcaaagaaagcaaaactgttacaaactaagggctgaattttattgttctattggtaaaatgaggtgacgattgtgtcgttgccgtgatattttgagtgtatgaagaagcattatttatttttcgtttcggtagcctattcctatcctatacttcgcccgcttcaggacgaaatcaggcgtagaggggatgatgttgcatggtttatcgagtcagactgcccggttctgttggcccaggatgagaggtggcttcaatccgtccaggaagtgatggattatcagcctattgctgtttttgcaccgggcaattatatttatgatttcttcccgggagtgaaagtctcccttttccatggctaccccatcaataagcgtggcgatgaaaaggatgaccatttttctgttcgcggatggttcgatgtctattgcacacaaggagaaacgagcactcttcccttcaaggagcttgagaggaaatacggcttctttaaggtatatgaaactggctggtgcaaggcggatactttcgtgaaggaacgtgcacatactcctcataatgcacgtccggtagtcttgtactcttctacgtttaccaaaaatataacttctgctcctcatctgtttgataccatcaagagactggtgcgcgagaagaactgggattggattatttcgttccatccgaaattttcggatatggaagtcctcaagaaatacaaggaactggccgcttcctgccccaatattactttccacgagagtggacttgttgatgccaagctgctgaacagtgcggatgtattgttgtccgatgcttcgtctgtgattgttgaggcgatgatgttggacaaaccggttgtgacctattgtaacaccatgccaggggatcatttgctgaatgtcactgagacggatgctgtagaaggagcgatagaaaaggccatttcccgtccggcagaactgatggagcggatgcgtgcctacgtgcacaagcatgaggcgcatctggacggtgagtcctcttcacgggtactggatgccgtaaacaactacatctggtattttcaaggtaagaccagaaccaagccttggaatctggtacgtaagtttaaattgcgatggcgggtgggctatccgttgatggccactttgcggttgtggtaattgtcatagcttatggagaacactgagacactacctctgataagtattattgtaccggtctataatgtaaagaattacttggagaaatgcctgcaatccatttgcgggcagacttataagaatctggaaataatattgattgacgacggctcttccgatggttcgggagagctttgtgatttatttgcccaaagggatggacggataaaggttatccatcaggcaaatgcaggtcagagtgcagctaggaatagaggtttggcggtagctcaaggtgaatttcttggtttcgtggatagcgacgactggattgaaccggatatgtacgaattcttgtatcacttactgaaagagaatggggcggatatatccatttgctcgcattatatagaaactgccgtaaagaccagagtgaagcactcttctgggcaattctccagcttttctcgtgaagaagctatccgaacattggtagaagataagcgtataagaaattatatgtgggataagttgtataagcgtcaattatttgctggaatatattttccggtaaatagagtttttgaagatattgcagtttcttatcagatattttataaaacgcagaaagtcgttatgcaagactgtcctaaatatcattatttgaaacgtgaaggaagtactactcaaggtaaattgtacaattacgaaaaggaatatctgctctttcaaactgtctatgaacaagtgaaatttgtgcgagaaaaagaaatatgggataaagctccttattgtgtacatgaacggggaattcatttgattgaccatttgatgatgcttcctcaatcttctttgatagatgatgttatcaatgatgtattagccagaatgcaggagtttgataatgtgtcgtggccgcaattgggtgttatgcatatatttaagcgccgtatgatgtattgtcatctaaaggtttatagatgtatttaccgtttagtgaggacattcttcaaatctaaacggtataaattccaaacattataactttaattgaatctcaataatgaataaagcaagggttatagctttttatctacctcaatttcatccaataccagaaaacgacagatggtggatgaaaggttttacggaatggactaatgtaggaaaggcacgtccattgtttcctggacattatcaacctaaggtgccggcagatttgggatattatgatttgcgagtgccggaaacacgtaaagcgcaagctgatatggcaaaagaatatggtatcgaaggcttttgttactggcattattggtttggaaatggaaagagactcttagagcgtccgtttaatgaagtattgtcttctgatgaaccggattttcctttttgtctggcttgggctaatgagtcatggaggggcttttatcacggcataaagagcaaagatactttgataaatcagctttatccgggagaacaagattatatagctcatttccacgaggtattacctgcttttaaagaccatcgctatattacagtggatgagaaaccgttgtttatggtttatcatcctttggatcatccggagatgaaagagttcattgaactctggcgtactttagctgtgcagaatggcttgaagggggtttatttcataggacaaacctatcatttgaaagaagaaaaagagagacttatgaaaatggggtttgatgctattaatgttgtacgcttgtttgactttgagaagaaagctgctctgacttataaatatgcgaaatggaaacataaaatatttcgtattcctaaggttgtggagtataagaaggccagttctttctttgtgggtgatgaagaatatgaagagaatattatacctaccattattcctaactgggatcattctccacgttcccgtggtaaatcgttggtcttgaatcacgctgaaccttcttattttgcccgacatatgaaagaagcaataaagcgtattgagaataagcctttagaccatcggcttgcatttgtaaaatcatggaatgagtgggctgaagggaactatctggaaccggatttacattatggaaaacgttatctggaagtgataaaaaagaatgttgtagagggatgatttctatggaagaaaagatagcaattgttattccggcatataagtgccgcttcctccggcagactttggattctattgtcgtacagacttgtcggagttttactgtttacataggtgatgatgcaagtcctcagaatctgaaggaaattgtttctgattatgcggataaaatgaatattgtctatcgacgttttgatactaatctgggtggagtggatttgccggggcattgggaccgttgtatagcacttgcaaaagaaccggttatttggttcttttcagatgatgatttgatgccgcaggacggggtagagcgtattataaaagcattagaatgctatggtacgaggcatgggatgttccgttttccccttgctgtgatagatgaaaatggcaagataatacataaaaatccttcattgcaggaatatccggtttcgggctatcagtttttgttggataaattggaaggaagaatttattcggctgcttgtgaatatgtttttactcgtgatatatatgaacggataggcggttttgtgaagtttccattggcgtggtgttcagacgatgcaacgtggacaagcataggtgaaaatgcaggtggaatgattcctttgccgggtaagccggtttgttggcgaaatgtgatgggcgagaatataagttgttccttcaattatgatgaagagaagatagtagctacaaggcaatttataaaatgggtttcagttttttactcggacagacttcaagatagaaaactacagcatgcgataaagaaatatgcccatacgatattgcattacagtttgcaagatcgttataaattacatgatcttatgggtatttgtcgtagtttatggtatatttgcccttctgtatcattaagtgtggcattccgcatgtgtaagttgaaacttagaaatcgaaagagataatgaagaaaattctttttatacttccttgtgtgccttatccgttgactgctggaggtaatcaggcctttttcaatatggtggaatatatccggcacaaaatgtctgtgtctttgttgctttcgccgggaaataaggagatgaatgatgtcgaaagtttaagggctttatggacaaatgttgatttctatctttttagggaagaagatgcagaacctaagactcgttgcccccgatattaccgttggttaaaaaagatgtctgaatccatttcccgcaagatgcaacggcaactgtattcttttcagcaagagcatccgtataagaatatgacgttgaagaattcttgttttaaaccttttcccaaggcatacgtagagtatgtgtctgacatctcacgtcgtggatttgatattattcaggttgagttctatccattgataaccttggggtatctattgccaaaagatgtacaaacagtgtttgtgcatcatgaactgaggtatatacgtaatgaaaatgaaatggaatgccttactcatgtaacagatgaagacaagatgctctatggtattgctaaggatatggagaaagccgctttacgtcaatataagcatgtaattgcattgacggatattgaccgtttattgttggcagacttggttggacaagaatgcaatatttatgtttctccggcagtggtacagatagagtctgtttatgacagaattgtgaagccggcctctgttcgtctgacatttgttggaagtgaaaatcattacccgaaccaggatgcagtagattggttttgtcatgaagtagccccttgtttgcgtgctcagggttttaaatttgtttttcaagtgattgggacatggaagagccgttacgtgaaaagtcttcaggcagtatgtccggaaatggagttagtgggttatgtggaggatttgcaggaatacttgaatggaagcatcgttctggtgccaattcgtattggtagtggtatgaggatgaaaatattggatgcggtttcctctatggcttcttttgtaactacgacaaaaggagttgagggaattgacctacgtcacaatgaagagtgtttgattgctgatagcgcaactgattttgcagcagcagtcattcgtttggaggcggataaaaaattgcaagtcaggctggcgacgcaagcattgaagcgtttgcgtgaactttataatcctcaggaaatgttggagagaagactggctgtttatgatgagatattgcaaaataatacaaactaatagcatcagattatgctttcaatcataatttgttcggtatctcccgaacgtttggagcaagtaacccggaatattcatgatactattggtgttgattatgaaatcattgctattgataatcgtgaaaaacaatggccgatagcacgtgcgtataatgaggagcttctcgggcacattatccctttctgtttttgttcatgaggatgtaaagtttcattcggtaggctggggaaagtgcattgagaagaaacttaaggaaccggattgtggtataatttaagtattgtgacataaatagactatataaaatttgactgttatgaatggaaataagattaccttttggagacgtaaatttttgtcatttatatatgagaagaagattcgtggaaatggtatatacactattgaaaaatatagaatactgaaagtaactttgcttaaaaaggtgatttcttatgatgaagttaattttacatatttaaaattccttcattttactaggaaagtttcagaaaaagaactattgtttaaagtgaataatcgttgttttgatgttcttgatattcctttggctcaggatagtttacctttagttagtattattgttccaaattataatcatgctctatatttaagagaacgtttggattcaatttatagccaaacgtataaaaagtttgaggtaattctattggatgatgcatcttctgataatagtgttgaaatattgactgaatatgctcagaaatatccacaaaaaacccgtttaatagtcaatgagaagaattcgggaaaagtttttgctcaatggaataagggattgagtttggccaaaggagagtatatatggatagctgaaagtgatgattattgtgataaaggttttttaaaagaagtacttttagggttgcgccaccaatcggtaatgctttcctttgcaaggagtgtattcatgaaagatggtaaaaaaatatggtcaatagagagatatctaaaggattcgtcaatatcttggaatgctccttttgttatgtcggctcacatgcttgtgaataaggcttttgggattaaaaatgtagtcccaaatgtcagtagtgcggtttttagaaatgtgggtactatacctgatgagattactgctatctggaaagatatgtccttatgtggtgattggttattttatctatggttgattcgaggaggagctgtcagctatactaataaagtgaccaattattatagaatacatgagaatagtacttcattgaaagttcaagatacattggattattatattgaaacttttcgtgtttcttgttttgtagcccagaactatgcagtagatttatcgatttttgatactgttaagaataacttagtacgacattgtatagatagaaaacatgaaaacaaggtagaggaggttgagagaatatacgatcttaatcagataaaagagtgtgcaaaatgtcggcgtccgaatgttgctatttgcggctattctttaattcaaggtgggggagaggtatttcccatttatttggcaaatgaattgaaaaagcaggggatagcagtaacttttgttgattttagaagagcaaattatgacgaaggaatcaggaaaaaactggatagagatataccattaatcgaacttagtgacgttaaattctttaatggtgtaatttctgctcttggaacggagatcgttcatactcatgaagggactgtggattactttgtagctcgcgttataaggaataaggaaggtgcttgtaagcatattattacacttcatggtatgtatgaagctatttctaaaaagaacttggatggaatattggagtttgtgatcccaagctgttcttgttttgtatatattgctgataaaaacttgcttccgtttaaggggctatttcaaaacttgcaatttcggaaaataggaaatgggcttccgcaaatacctattgttccccacaaaagacttgagttgggtattgaagaaaatgctttttgtttgacattggttagtagagctatttttgagaaaggctggatagaagcgatagaggctgtaaaaatagcaaggaggaagtcagagcgaccgattcatttgatattgattggggaaggagaatgttatgactttttaaaaggtaaaaaccttccttcttatattcatttgctgggacgcaaaagtgatgtcaggaattattttgctatgtctgatgtgggattgttaccttctcggttcaagggtgagagtttccctttagttgtgatagaaagtttgatgagtggttctccagtcgtggcgagtgatataggagaagttcgtaatatgttggctgatgaagctggtaatatggctggtatgttatttaaacttagggagggtgaaataccagttgatgaattggcgcagattattttgcttttggctacagataatgaaaagtacatgcagttgaagaggcggactagtgaggttactaaaaaaatgaatattactcatactgcagaacggtatattggtgtgtataatgaagccttgaatactttgccaaaggaatgaagttgtagtagtaagcctatgatagaagcattttgactgctttatatgattaattgttataactaaagatggagaaaaaactggcaataattatacctgcttataaagctcgttttttgagagaaactctggattcaatacttaagcagaatagttcagaatttattgtatatgtgggtgatgatgcgagtccggagaatatagaagggcttgtccatgattatgatgagaagttagatattgtttaccatcggtttagtacgaatcttggaggcgtagatttgcctgggcagtgggatagatgtattgctttatccaatgagccgttggtttggcttttttctgatgatgatataatgccgtttgatggggttaaaagagtaatgcaggctgttgagaaatatggagataagctggtgtgtatgcgtttccctttaatggtaatagatgcttgtggtaacatgaaatatcagaatcctccttttgaaacggaacggatttctggatatgagtttttattggataagttatcaggaaagattagttcggctgcttgtgagtatgtttttagccgtgatgtttggaaacaaataaaaggttttgtgaagtttccgtttgcatggtgttcggatgatgctacttgggcaagttttgccgatttaacagaaggaattatttctctacctgggagggctgtgtgttggcgaaatgtagaaggtgagaatattagtaattctgtaggttttgataaggaaaagcttagagcaacaggccttttttttaattggataaacagacattatccttgcaatcttagagatgctagattgagaaaagctttagaagcttatactcatacgattttgtcttgctcagttcgtggtaacttcagtttgtgtgatcttgtccgtttatgttatgctcttggtaaaatagattatgttgccgctttacacgtggcgtatcgccatttgttgaaaaaatgagtttttgagaaaatatgaaaaagatactttttataattccctatattccatatcctttagattcaggaggtaatcaggccttttttaatatggttaattatatccgtaatcgaatgtcggtgtcaattttgctttgctcaaaatccgaagaacatgataaaaatatagtggccctgaaaaaattgtgggcaaatgtagatttttttgtatataaatggcctaaaaagaaatctgtacatattgaagtccgtaatccattatattacaatgttttgaaaagagtgaaggcttctgtggagcgcaaaatgagaaggcagattgtgaatatgggggtagatatggaatcaggtttagatccagttcgcgagaattctgctcttttaagatcggtttttgagccccttgaatctggatatgctcaatatatttgtcaggttataaagcaaggatatgatattattcaggttgaattttatgaattgatttctgtaggatatttattgccggaaaatgtacaaacgatttttgtgcatcatgaattaagatatgtccgtaatgctaatgaaatgtctttgtttgaagagatgacagatgaagatcgcatgcttttctctgtggcaaaggactatgagcgagctgccttgctaaaatataagcatgtaattgctttgactgaagtagacagacaactgctgattgattttcttggtcgtaaagaacgtatttatgcttctccagcggtggtgcagatgtcagatacttctattgaagaatttactccggcaattactcatagattaacgtttgttggaagtggagatcattatccgaacttagatgcgattacttggttttgcaaagaggtggctccttatttgcataagcaaggattctcttttgattttagggttgcaggacggtgggattgctctcatatagtaagactttcttctgtttgtccagaaataaaatttgtaggttatgtggaggatttgagtgattttcttaaaggtagtattgctcttgttcctatacgcatcggtagtgggttgagaatgaaaatattagatgctgtatctttgggcattccttttgttactacttctaaaggagtagaggggattagttttaatgataatgaagagtgtttaaaggcggatacagctatggattttgcagatgcgattattaggttggctaatgatagtaacatgcagtgtagacttgttttacaagctaaacgtaaattagaagatttatatgattggaaaaagatgttagaacagcgtatagctatttattctcatattctgaatttttaaaatttttattttgagtatttaggtattttcgtgtaatttagcaatttaattataatcaaaacttatggtaaaacagtttttctctttgatgaagcgatatatcatgccgtatcgcaagtatttaacgtgggcattgatactgaatttcctttctcaatggctgaacgttttttcttttatggctattattcctattttaaacatattgtttaagattgacactaaagtgtatgaatatatgcccatggactggggaaactttgacaaagatgttcttattaataatgcttattattggatcagtaattttgttttggaacatggcgcttttcttacacttgttatgatgggatgtatattggtttttatgacgttattgaagactgcaggttacttcgcttcttctgcaattatggtccctcttcgtacaggtattgttcgtgatatccgtattcaagtatataataaagtattggagttgcctcttagtttcttttctgaggagcgtaaaggggatattattgctcgtatgagtgcggatgttactgttgttgagaattctttaaccagttccattgacatgttaattcgtaatccgatagctcttttggtttgctttgtcactttgtttactgtaagttgggagatgactttgtttgtccttataattcttccattggctggatggctcatgggaataatcagccgtaaattgaaaagacaatcatcagcggcacaagcccaatggggagatataatgtctcaattggacgaaaccttgggaggattacgtgtgattaaagcttttcttgcagaaaagaaaatgtctgcgcgttttgcaaagaccaataatgaatttagaaatgctgtgaatgaaatggtaatccgtcagagttcagctcatccgatgagtgaatttttgggtacttgtatcatcgttatcgtattgctgtttggtggttcattgattttgagtaatacttattctcccatggatgcagccacttttattttctatttagttattctttatagtatcattaatcccttaaaagagttctctaaggctttttataatatacctttagggcttggcagtatggaacgtattgacatgatattaaaggctgagagccatataaaagatcctatgcagcccttatcattaaatggctttgagaataaattggaatttcgtgatgtaagtttcagttatatagagggaagaccagttttgaaacatattaatttgacggttcataaaggtaagactattgctctggtaggacagtcaggatcaggaaaatccactttagtagatttggttcctcgttatcatgatgtcacagaaggagccttattgatagatggtaagaatgtgaaggatgtttccataagcagtttaaggtcattaataggcaatgtgaatcaggaagctattctgtttaatgatactttttttaataatattacatttggtgtcgagaatgctacgatggagcaggttgttgaagctgcaaagatagctaatgcacatgattttattatggaaactgagaaaggatatgatactatgattggtgaccgtggtgggcgtttgtctggtgggcaaagacaacgtgtcagtatagcgcgtgcgattttgaagaatcctcctattttgattttggatgaggccacttctgcacttgatacagagagtgaacgtttggtgcaagaagctttggaacgtttgatgaaatcacgtactaccattgccattgcccaccgtttgtctacaatcaaaaatgcagatgagatatgcgtactttatgaaggtgaaattgtggaacgtggaacgcatgatgagcttatagctcttaatggatattataagaaactgaatgatatgcagtcactttcataaatatattttgtgaggaatatatgactattgatggtcagtgattttttatgtagacagcggattagttaatagtccgctgtcgttttatatttagagataagcatcgaacttagatgtttttcattttattcttgtacctttgcaaccttataattcacttaactacaatcaatgaaggaattcctacaactgatgcggcgctttgtgtcgccttacaagagatatatcggttgggcaatcgtgctcaatgtgctgtccgctatattcaacgtcttttcatttacattgttaatccctatccttaacatccttttcaagactggggcgaataccgaggtatatcacttcatggagtggggaagcggcagcctgaaggaagtggcggtgaacaacttctactactacgtcacccagatgattgagacacacgggccgcagatgacactgctgttcatggggctcttccttgctttcatgaccatgctgaagacctcctgctacttcggttcttctgctataatggttcctttgcgtacgggagtagtacgcgatatccgtgtgatggtctattccaaagtgatgcacttgccacttggttttttctctgaagaaagaaaaggggacatcattgcacgtatgagcggtgacgtaggcgaaattgaaaactccattaccagttcactggatatgctgctcaagaatcctatcctgattctgctttatttttccactttgattgtaaccagttggcagctgaccttgtttactgtcctggtattgccgggtatgggctggctgatgggaaaggtcggcaagaagctgaaacgcaagtcgctggaagtccaggggaaatggagcgacacgatgtcgcaactggaagagacgttgggcggactgcgcatcatcaaggctttcatagccgaagacaagatggtggaccgtttcaaacaatgtagcaacgagctgcgtgatgccaccaacaaggtagccatccgtcagtcgttggcacatcctatgagcgaattcctcggtacgttgctcattgtattggttctgtggtttggtggtctgcttattttgggcgatggtacttccatggaagcttcaacgttcattttctatatggtgattctgtacagtatcatcaatccgttgaaagactttgcaaaggcaggatacaacattccaaagggtctggcatccatggaacgtgtggacaaaatactgaaagccgagaaccccattaaggaaccggtaaacccgttgccgctgcacgggatgaatgaccggattgaatttaaggacctctccttcagttacgacggcaagcgcgaagtgttgaagcacgtcaatctgatggtgcccaaaggacagaccattgcacttgtcggtcagtccggctccggcaagtcgacattggtggatttgctgccgcgctatcacgatgtgcagttgggtgagattacaattgacggtgtgaatattaagaattttcgcatccacgacttgcgtgcgttgataggaaacgtgaaccaggaggccatcctgttcaatgataccttcttcaacaacattgctttcggtgtggaaaatgcaacaattgagcaggtggttgaagctgcaaagattgccaatgcccacgatttcatcatggagaccgagctcggttatcagaccaacattggcgaccgtggcggcaagctttccggcggacagcgccagcgcatcagtattgcccgtgccatcctgaagaatccacccatcctgatactcgatgaggctacttccgcactcgacaccgaaagcgaacgcctggtgcaggaggcgctggaacggctaatgaagacccgtaccacgattgccatcgcccaccgcctttccaccatcaagaatgcggatgaaatttgtgtgctctatgaaggtgaaatcgtggaacgtggtaagcacgaggaacttctcgagaagaacggctattataagaggctgaatgatatgcagtctctctcatagaaataaagttctgcgcaccttgcttccatccgcttgtgctatgttgttatgactaaataggaagttaatccattgtaaggcaatgtattgatttcgtgtatcccttcttgttgatactttgtaaataggaagttaatttcctgcaaacagcatattaattcttctttctcttctatacttcttacgcagaatttatgatgtaggtgggtgttgatggctaccggcagagtgtttcacggctgttaggcgatgatgaataaagggcgttcttttgccttttacgcttttttaatatctgcttgcttccattctatcactaattatcctatttttgcaaagaacacatacataaacattgcaaatatcatgaaaaaattatacccaatgtctacgacaacagctactatgactattagtccaagtactcttaatcatgtaattcaattgaccccgataatactataactgtaaatatttaatattcgcctaccatgaaaataaaagttggtttgatagggttcggcagaatggggcaaatgtattgggaggaaatgcagaaaagcggtcgatgggacatcgcatatatctgtgataccgatccggcctcccgagaattggcaagaaacttttccccttcatccagaatcatatccgatgaacaagaaatctttgacgaccagagtgtagaagctgttggtctttttgcattggcaaattccagaaaagaacaaatagagaaagctgtccgaagccataagcacatcctgacggagaaacccattgccgataccattgacaaggaatgggaaattgtggacctgattgaaaagtatgaccgcattgctgctgtcaacctttatctgcgcaactcctggtatcaccaggctatgaagcagtttatcgatgaaggcgaaattggcgaactggccatcttgcgcatctgccacatgactccgggattggcgccgggcgagggacacgaatatgagggtcccgcctaccacgactgcggcatgcactacatagacattgcccgctggtatgccgacagtgaatacaagacctggcatgcgcaaggcatgcggatgtgggactacaaggacccttggtgggtacagtgccacggtacgttcgagaacggcatcgccttcgatgtcacacagggattcgtctatggacaactctccagaaaccagactcataatgcatatacggacattattggtacaaaaggtatcgtgcgcatgacgcatgatttccggactgccgtggtggagcttcatggcgtgaaccgtacgcttcgtctggagaagccgtttggcgggaagaatctggataagctatgcaatattatggctgactccatcgagagcgggaaacgcgatccgagattgccgcagatgcgagactcggccattgcttcccaatacggatggaccttcctggaggatgcgcgccgccacgacctgcctggcataggcgacttgcagacgctggaggaaattagggagcgccggaggcatatgaaggaaggttacggactgctccgtccgaagaagacggtagtctgatgcctattgtaatgagaagtgttttaaaacttaattatattaaccgattttaaaatctaaagaaccatgtcgaaatttacaagaagagagtttcttaagaccggaggtttagctttggcgggtcttaccattgctccaagcagcattttgggtaagagtcacggacacgtacctcccagtgaccgtttgaacattgctgccgtaggtatcggtggtatgggacacactaacattaatcatgtgaaggctacggaaaatatcgtggcgctgtgtgacgtagactggcgctacgcgaaaggtgtgttcgatgagcttcccaatgcgaagaagtattgggattatcgtaagatgtacgatgagatgggcaaggatatcgatgccgttatcatcgctacggccgaccatacacatgccatcatcactgctgatgccatgacgatgggcaaacatgtatattgccagaaaccgttgacgcactctgtatacgagtcccgtctgcttacccgcctggccgcttctacgggagtagttactcagatgggtaaccagggttcttcggacgaaggtaccgacttggtatgcgagtggatatggaacggcgaaatcggtgacgtgacaaaggtggaatgtgctaccgaccggcccatctggccgcaaggattgaatgttcccgagaaggaagaccgcattcccaaaactctgaactgggatttgttcaccggtcctgccaagatgaatccgtataacgaaatctatcatccctggaactggcgcggatggtgggattatggtacgggtgctttgggcgatatggcttgtcacatcctgcaccagccgttcagagctttgaagttgttgtatcctaccaaggtagaaggttcgtctacattgttgctcaatgcctgcgctccgcaagcacagcacgtgaagctgactttccccgcacgtgaaaatatgccgaaggtggctatgcccgaagtggaagttcactggtatgatggtggcatgatgcccgaccgtccgaaaggcttccccgaaggaaagcaactgatgcagagcggtggcggtctgactatcttccacggaacgaaggatacgctgatttgcggttgctacggacagaacccgtggttactttctggccgcgtgcccaatgcaccgaaggtttgccgccgtgtaccgaaggctatgaatggcggtcatgagatggactgggtacgtgcttgtaaggaaagtccttccagccgcgtaatgcctaagtctgacttctccgaagcaggaccgatgaacgaaatggtggcaatgggtgtattggccatccgtctgcagggcctgaacaagacactggaatgggacggagccaacatgcgctttaccaatattggcgacgacgagacattgcgtacagtcatcaaggacggcttcaagatacacaacggccatccaagcttcgacaagacatggacagatccggtaaatgccaaagcttttgcagaagagctcatcaagcataactaccgcgaaggctggaaattgcctgatatgcctagataaacattaaaaggggcatcagaacttgttttctgatgctcataaacgaatactaatcatttaatttttcagattatgaagaaaatatattatcctttggcttgttgccttatcggaggtatgctcgcctcttgcggtggcggtgcaaagaaatcgaacgctacggaagaagccgcagctcctactactactgcggtgtcttactccaagtctttgaaagcgcctgaaacggacagtctgaatctgccgattgatgcggacggttatattactatttttgatggaaagagcctggacggatggcgtggatacggtaaggataaagtgccttccaggtggattattgaggatggttgcctcaaattctgtggaaccggtaccggtgaaggacagaccggtgaaggtggtgacttgattttcgcccataagttcaagaattttgagttggaactggaatggaaaatttcgaaaggtggtaactccggtatcttctatctggctcaggaagttacttcaaaggataaggacggcaacgaagtgctggaacccatctatatctctgctcctgaattccaggtgttggacaacgccaatcatccggatgccaagctgggtaaggacaacaaccgtcaggctgcttccttgtatgatatgattcctgctgttccgcagaacgccaaacctttcggtgaatggaataaggccaagattatggtatacaaaggcactgtagttcacggacagaacgatgaaaatgtactggagtatcacttgtggaccaagcagtggactgatatgctccaagccagcaagttcagcgaagaaaaatggcctttggcttttgaactgttgaacaactgtggtggcgaaaaccatgaaggctttatcggtgtacaggatcatggtgatgatgtttggtaccgcaacatccgtgtaaaggttctcgactgattccttctaaaaagatagtactatgagaatcaaacatatgatgattttgtcagcactgtgtttatccatgatggccacaagctgtagcagccagagtagggaaacgacgccggaaacaacgaaaaaggaagttgccatacagctctactctgtgagggacttggtgaaggacggcagtaacctcgaccagattctgaaggatttggctgatatgggctataccagtgtggaggccgccaactacaatgacggtaagttctacggcaagactccccaggagttcaagcagatggtggaaaagagcggtatgaccgtgctttcttcgcacactacccacgggttgtcggacgaggaactggcttcgggcgactttacggaagccttgaaatggtgggatcagtgcattgctgcccataaggaggccggtatggagtatatcgtgactccgtatctctccgttcccaagacattgaaagatttgcagacctactgcgactattacaatgaagtgggcaagcgctgccaggctgccggtttgaaatacggttaccacaatcatgcccatgaattccagaaagtggaagacaaggagctgatgctggactacatgctgcaacacaccaatcccgaatatgtattcttccagatggacgtttactgggtagtgcgcggccagaacagcccggtggattacttcaacaagtatcccggacgcttcaccatgctccatatcaaggatcaccgcgagattgggcagagtggtatggtaggttatgatgctatcttcaagaatacggatactgctggcgtgcgccacatcgtagctgagattgagaaatacagctgccccgtagaagagagtgtgaagcagagtcttgactacttgcttgatgctcctttcgtgaaggcatcgtatagcaaataaaacatgatggcggctattcattcataagctcggccgcatcattttcttgacgcgggcacaaccggatgaagaatccagggtgctcgcgtttttttacttccttccgaagtcggccggaatttccccccattgctttgtctcccattttaggatgcgggtggtgtaggtgttttcgcgcaaccacttctctgcacgttctattaggtggaaaagctcttcggtcttggcgtcacgcggcagtttggttttgcattttttctgttttatccagttgatggcgtttacgctgtcactgtagatgggcatgtcgaaacctttctgtttcaacaaggcaagtccgtggacaatggcgaggaattcgccgatattgttggttccatacatcggcccgaagtgaaagatttcctgacggctggcgacgtgtactccccggtactccatggcaccgggatttccgctgcaggcggcgtctacggcaaggctgttttctgcgacggcggcaggaaggggagcgtcggcgccgggaatagtcttggcaggagaaggggccgaccgcttgatgtacgcgtacggcgaagaggcaaaggctttttccgcttcctcgcgtgattcgaacgacttgtattttgctccttcgtagcctttggtctgcagttggcagtctgtccaggaagtgtagatacccgggctgactcccgcccatacgacgtaatatttttctttcttcataactgcggacaaaggtaaaaaagaaaatccgaacaacttaactctttcatttgtttctttgtatggcggatataaaataaagaagagaagactcaataaaaaaagaaaggacaaaaaatgaagagaacatttgcagaggccatggcgcatcgccgtagttattactctatcggcagcgattcgccagtactggatgaagaaatagtacacattattcgtgaagccgtaaagaatgtgccgtcagctttcaattcacagtctacaagaattgtattgctgctgggcgacgaacataagaaattgtggaacattgtgaaggaaaccctgaaagcacgtatctctgccgaggcttttgccaagacggaagccaagattgacggctgctttgccagcggacacggtactgtgctctattttgaagacacttctgtagtcaagaagctgcaggaagcattcccttcctataaggataatttccccacttggtcacagcacacctccgctatgcaccagtttgccatctggactatgctggaagatatggggttgggcgcctccctgcaacactataaccccttgattgacgacgaggtacgccgcacctggaacctgcccggcgactggatgatgattgcacagatgcccttcggtacacccaccggtgaaccaggagaaaaggaattcgaagatttaagcaagcgtatcaaaatttttctctgatacagaggcgttttcagcttggaattgctacctttgcaggaaacctgtaactcgtagcagatatgatgcgtattttcttgaccggctacatgggagccggtaaaactactttaggaaaggcttttgcccgcgaaatgaatgtgccgttcattgacttggactggtacatcgaagaacgttttcacaaatcaatccgtgaattgttcaccgagcggggagaagcctcttttcgtgaattggagcgaaacatgctgcatgaagtaggggaatttgaggatgtcgtggtttctaccggtggcggtactccttgtttttttgacaatatggagtatatgaacggttgcgggcagacggtgttcctggatgtacaccccgatattctgttccgccggctccgggtggcgaagcagcagcgccccatcctgcaaggcaagacggacgaagatttgcgcaccttcattgtggaggcgctggataagcgtgcgcctttctactcgcaggcccgttatcgctttgatgccggttatctggagagtcgcagccagattagcgaatccgtgcaacggttacgccaacttttaggactttaatcccttgtaaatgtgtatttttcagtccgatgagctggatgtattagatttatgtgtatttttgtcgccccttttataaaacacactatagtgggaaaatagtaaattgtaaatagtctaatagtaaatgtactgatgagaaaatggcgtattgaagattcagaagagctgtacaacataactggttggggcacttcgtactttagtatcaatgacaaaggtcatgttgtggtgacaccgcgtaaggatggggttgccgtcgatttaaaagagttggtggacgagttgcagttgcgcgatgtagcggctccggtattggtgcgttttcccgatattctggacaaccgaatcgagaaggtgtcctgctgcttcagacaggccgccgatgagtatgggtataaaggagagaactttattatctatcccatcaaagtgaatcagatgcgtcctgtggtggaagagatgattaaccatgggaagaagttcaatctaggtctggaagcgggttcaaagccggagttgcatgctgtgataggggtcaatacagacccggactccctcgtggtctgtaacggatataaggacgagagcttcattgaattggcactgttggcgcagaaaatgggcaaacgcatttttcttgttgtagagaaacttaatgagttgaatcttattgccaagatggcgaagcaattgaaagtgaaacccaacattggaattcgcataaaattggcttccagtggaagtggcaaatgggaagaaagtgggggagatgccagcaagttcggactgacatccagtgaactgcttgaagcgctggacttcctggagaaaaaggacatgaaggactgtctgaagctgatacatttccatatcggcagtcagataaccaagatacgccgcatcaagaatgccttgcgtgaagcttcgcaattctttgtgcagctgaacaagatgggattcaacatcgaattcgtggataccggtggcggtatgggagttgattatgacggtacacgttcttcaagcagcgaaagctccgtcaactattccatccaggaatatgtcaacgatgtggtgtcgacatttgttgatgctgccaacaaacacggctttcctcatcccaatatcattaccgaaacgggacgtagcttgactgcccatcactccgtgcttatctttgaagtactggaaacggcttccctgcccgaaatggatgacgactgggaaccgggagaggatgcccacgaactggtgaaggaactgtatgacatctgggacaacctgagtcagcgcagcatgctggaaccctggcacgatgcacagcagatacgcgaagaggcactcgaccttttcagtcatggcatcgtcgacttgaatacgcgcgcgcagatagagaaactctattggagtatctgccgcgaaattaactccattgccagcggcatgaagcattgccccgaggaattccgcaagttgagcaagctgcttgccgacaagtatttctgtaatttttcgctgttccagtcattgcccgattcctgggccatcgaccagatgttccccatcatgcccatacagcggctggatgaaagacccgaccgcgaggctactttgcaggatatgacttgcgactctgacggtaaaatagctaatttcgtcagctcgcgtgccgatacgacgaccctgccgctgcactcgttgcgcgacaaggagcactattatctggcggttttcctcgtaggggcctatcaggagattctgggagatatgcacaatctgttcggtgatacgaatgctgtgcatgtgtctgtcaattccaaaggctacaccattgaccaactgattgatggagagacggtggcagaggtgctggactacgtgcaatataatcctaagaaactggtacgtacgctggaaacttgggtgacgcaatccgtcaaggaagggcgtatctctgtggaagaaggaaaggaattcttgtctaattaccgttccggactgtacggatatacttatttggaataaaatggagaaactgactgtaataaaggtgggtggcaagattgtagaagaggaagccaccctctataagttattggatgactttgcagccatcgaaggctacaaggtcttggtacatggaggcggacgctcagctacgaagctcgccgcccaactggggattgaaagcaaaatggtgaatggccgtcgtatcactgatgccgaaacgctgaaagtggtaacaatggtgtatggcgggctggtgaataagaatatcgtcgctggcttgcaggcgcgcggtgtcaatgcactgggcttgacgggagccgatatggatgtaatccgttcggttaagcgtcccgtgaaggaggtggactatgggtttgtgggcgatgtgaagcaggtgaatgctgcttttttggcagacctcattcataagggtgtggttcccgtgatggctccgctgacgcacgatggagaggggcacatgctgaatacgaatgccgacaccattgccggagagactgccaaggctttggcgggcttgttcgatgttactttggtattctgctttgagaagaaaggggtgctgcgtgacgagaacgacgatgatagcgtgattccacagataacaccggaggaattcaagcaatatgtagccgatggagtgattcaaggtggcatgattccaaaattggagaactctttcgaggcgttgaatgcgggtgtgtccgaagtcgtaatcactttagcatcagccatcaacgggaacagtggaacccgtatccgaaaataattcaaaaaaaacggcaataggctgtaactttctgaatacttaaccgtcaatttattagagatgcaagaactcagctttcgcaatgacattctcccgctgaaggataagctttttcggttagccttaagaattacgtttgatagggcagaggcagaggacgttgtgcaggaaacgctgataagggtttggaacaagcgtgacgagtggtcgcagtttggttctattgaagcctattgcttgactgtggcaagaaatctggcgatagaccgtagcgagcgaaaagactcccgtaccgtggagctactccccgaaatggagcaagtctccgatgcatcgagcccttacgaaaagctggtgaacaaggaacggatggcgttgatacatcggttgatgagcaagcttcccgaaaaacagcggttgattatgcagcttagggatgtggaaggtaagagctataaagaaatagcagcggtcctgaacttgaccgaggagcaggtaaaagtgaacctcttcagggcgcggcaaaaagtaaaacaaacgtttattgatatagaaggttatggactctaaatatatagaacaactcttggaacgctactggcagtgcgaaacttctttggaagaggaagcatgcctgcgtgctttctttagcggtaacgatgttcccggacacttgcttcgctacaaggacttgttcgtatatcagcagcttcagcaggaagtgcatttgggtgaggattttgatgcccgggtgcttgccgaagtagaagttccggtggtcaaggcaaagcgcatgacattgaccgcacgtttcatgccgttgttcaaagccgctgcagtagtggcagtggtcctttctatggggaatgtgatgcaacattcatttttctcggatgtagaggaggtggccgcagccgatactatcggtaaacagatttccgcaccgtcggtagctctttcgggagatgtgcccgtgtctcatgaaaagcaggtaatggatagcctgcgtcgggtggacaagggtctggaaatcagtgaatagatattttcatttgcttttaaaataacattttcatttgctttaaacataatagttagtgtgctttattaaaacaacttgaggctgtgaagtttcaattctctcaaaatcttataaaaactaactaaaatagaagggacgctgcgtgatgcagcgtccctttattgtttgtacgcccagcatgggtggatgcacaaagaacgaagaacttcctcgcgggagtccttcgtcatctttataggtaattatttgagagagaatttagtttaggttcattaatcttaaagtctatattttccaatgttaaagcttatacagtccttttttcggatagtccagttccggattacccttgtagcccacactgccgcttccgctagtgcgtacttttaggaaatctgtggcatggcacttgatgtcgcctgaaccggcaacactggcggatgctttcttggcaacgaaatcggaagcaaacaaatcacctgaacctgccacgctgtattcagcttcttgggtgctgccgctcaggatagcggtacccgaaccggcaacggatgctttggtgaagttggccgttacgttgttcagcttcatgtcacctgaacctgcaacggatacttggaggtcattgcaagtgatgtcgctgctgttgatgtctcccgagcctgcgatggaaatatcgaggtctgtgcaggagatgttgttcccattgatgtcacccgaacctgccacagagattttgaggttgtctgtcttcagtccgtttttcagttccacgtctcccgaacctgcaacggcaatgccgttcaacttttctgcggacacacgtacttccagtttattataggatacgctgacattcttcttgaagccgatgtagagggtattgtccttgacacggatatccagtaagtctacaatgttgtccgaggtgtatacttccactgtcggtttgccggacttctgtgtgtaggtcacgtcggggctgccggctacactcagcttggtgaaattgtccacttttatgtctttggttacatagttcttgcttgccttgactgttttgctgccgaagcctccggaacggtatgtgtgttgttgtgaacaagcggttgtactgaatgccaataaggcgattgcgataaatgttgttagagctttcatattcttttgttttttgtgatttagtgtttattagttagacgtgaactgccttgaaaaagttgcatgtagaaatgcttttttcaaaagaaaccagttcagcatactttaatcaattattgtgccataagtgtaaaatggtgattgttaaaggatagccgtttttgtgcagtgttcattatcggacactccgtccgcttttgtcaggtatttgcttgcgtttttggatgattctttgttcatttgcaaagcctcttcccacccctttcctatgggagaggctttgatttatgacagtaaaccgcattatagaagataaagagcttggccctttgtttgtccgggtcaatgcccgggcacggcgtcttactttccgtacaaaggaagatggaatttacgtgactgtgcctccccggacttctcttgccgagatagagaatgccatcgagcagcttcgtccgcgtctgaaggctgccagacagaagcaggtcagaaagctgattgatttggattaccgcattgatacggagttctttaaactgacattggtcagcggacaacgggaacggttcttgtcccgttcggaattgggggaaatgcagataatctgtcctcctgatgccgatttctcggatgagaagttgcaggcttggctacgcaaggtaattgaggaagctttacggcgaaatgcgaaaattgttcttccgccccgtttgtatatgctttccatgcagcacaacctttcttacaagagtgtgaagataaattccagcagtgggcgttggggaagctgttcggcacaaggcaatatcaatctttcctattatctggtacttcttcccaagcatctgatagactacgtgctactgcacgaactggcacatacccgcgagatgaatcacggggagcgtttctgggatttgctcgatcggatgactgatggaaaggcacaagcattgagagcggagcttcggaaatatcaaacgaaaataaatgattagagattagtatgggtgtatcacggtaagtagttccttgttttgcagacagtgatactgcaaaaccactgcataccttttgcactgtcactgcactccttttgcagtgctgctgcaacacctttgcagtgacactgcaactgttttgcagtaacgctgcaaaaggtatgcagtatcgctgcagtgtcactgcaggagttgtgtaatgtctttgcagtgccactgcaaaagttatgtggtgtctttgcagtggctgttggtaagccaggaaacagcttgtcgactccgaaatatgagagcaaaatgcctcaaactttttatccctaattttttgccaactgctttacctcttccccttccttctcgaaccggtattctcctcctttttcgcttagctcaaataaggaaagcttttcagttgcattgtttacaatcatgagtgcgttttgctcggcaaagcgtttcacttcgatggtgaaaggttcttctgcaatggtgcggttcactagcaggctgtcgttgatgaatatggaagtggaatctccggcaaatcctttcgtcagtgtgatggtgtatgtctcgatgaatttgcgttctccttctttccgttgttgcagcctcatgctcatgtagacaaagatgacaactacaaaaatcacggcgaaagcaaggatgccgttgcctatcataaactgtttgttggtgttcagtcggtgtgccatggataaaaaggttttttaagaatggtacaaatgtaatgaataaatttgaaccgaccggctttttacttgctgtattcgctcggactcacaccgaactgtttcttgaagcttgtcgagaaatgggacagcgtactgaatcccgtcatgtccgctatctctgaaatagtgtattttccttctttgagcaattcggcggcacggttcagcttgtaggtcttgaagaatacgctggggttctcacccgtcagcccctttaccttataatagaacttggtacgggagattttcagtagctcggtcatgcgcgccacgtccagctccggattggagagttcgttctccatcaggtggtaaagctcggtcatgaaagtgttgtcctgcggcgaaagcacatttccctcaatcttatccgtttgggtggactggctcaggaggctgcgcactttctcgcggtttttcagttgggatttgataagcgccagcaggtagttgggctcgaaaggtttcgtcacgtaggcatctgcaccggtattcagaccttccacctgattctctacagtagctttggccgttaccagtatcacggggatgtggcatagttgcaagtcctcttttatctggcgacagaggtcgtaaccgtttcttccgggcatcactacatcactcagtacgaggtcgggcgcttcttcgttcatggctttgaaggcgctgtcggcatcgaagcggcagacgattttgtagatgggagaaagcagggctttcaggtagtgagccacttccgtatcgtcgtctactaccagaagagtttgcttttgctgccggatgctctctgtattttccagttgatattgttcttccgtttgtatcggaaatgccttgttctgttcctcttcggggagagtgcattcttcgggggtataagagagatcattcaccggtagcagtagggtgaagacggctccgtttccttcggtacggttgccggctttcagatagccatgatgcagcagcgccaggctacgggcatagtacagaccgataccggttccccagttataggtacctttggattgattgtccagttggtaatagcgttcgaatactttctccaactgttcctcggggattccgtggccactgtctgccacggcaactttgacgtactgtgtgtcgatgtctttgtccgtcagcgtaaagaggcgtgcagcctcttcgcgggtaatgacgtcgaagcacagttccacttttccgccgttcggagtgaacttcaaggcgtttgaaagcaggtttcctacaatcttgtccagcttgtccacgtccagccacatgaggaaagtatcctccaggccataagtgttcagtgcgatgcctttctcgttggcgttgatgcggaaaatgtctacaaaacgttgcagttgcgagatgatgtcggtccgtttcacccgcagttttagggtgtcattctccagcttgttgaagtccatcagctggttcaccagacggagcatgcgccccacactgcgttgtacaatgtagagtagctgcttgttctctccctctatcttggggctttcgcaaagttgtgtcaccggacccgaaatcatggtgagtggggtgcggaactcgtgcgagatgttggcaaagaaactcatgttcatacgattcacacgttgttcctggtccttctccagtttggcgcgtcgggcggtttctttttcctgcttaatgcgtagccaggcacggatgaagataccgatgatggcggcggcaatgagcagataggtgcaccatgcccaccatgtttgccaaggggcgggctttacgatgacgcgtatggaattttccctttctacaatgctcttgtcgttattcgttattttaactttgaaagtgtaggtaccggcaggcagattggcatagtaggcctcgcggttgttgcgggcatcaatccaatatttgtcgaaaccgtccatcttgtaataataatgtacgcgttcgtattcgcagtagtccagtgcggcaaaggagatgctgaaaccattctgattgtggtccaggcagatgtccggtcggtaggagaggtgcttgtctacacttttgctgtcttgtgggcgtgccaaccggttgtgtatcttcaaatcctcgaagagcagtggaatttcccgtttggtacttacgtccatagggttgaagaaagtcagcccgtgcgtaccgccaaaaaccagtgtcccgtcgggcaggcggcatagtagttggtaaatttccctacggtgcggtcatatttgcccagcccgtattgtgtgcctgtccatatattgccttgtgcatcttcctcaatgcaagagatgtcccggcagggtgtaccctctatggtctcgatttttccggtggcggcagaatagtgcagcagtccgttgctgacggttccaatccatacatctccacgactgtcttcgaagatgtcggtagggatgaatactgaacgttggatacaagcttgccagtcggtgttctcgaatggtacttcagcgctttcccaattgtcgggattgatttgcatgactgggttcatgaaggcagtggcccacatctttccgttgttgagtggaaggagtccgggtatgaaggttcccgtccaggaaaatacttttgtttggacaaattctttttcttcacgctttttggcataaagtttagggctgtgtgtacccacccaaattgttccacggctatcttgtgcaaacgacagcggtaggaagatgtcatgaatagcctctgtcttcagtatgccgtttttatagctgcatttcatcaccttgctcgcatagagggccgccagccagatgtagccctcgtcatctacgaatacgcgtgtgatgtccggtttgtcggtagcgcttttccccggaagtccaggctggtccacttctttcacttcgtggctgtccatgttgtaaacgtacagcccgtctatcatggtggccatccagagatttcgctccttgtccactgccacggacagcactgacttccggttcaggtatgagctgagatggttgttggtgttgaaacgttctttgtagttatagcgcacaacatacccttggtctacagagcctatccataggtttttctgtgagtcggtaaacatggtgcttatcttgaagtgaggtacttcgaagggaaaaccgttttcgctttgatgtatcatgtattcttccacgtagttgtagaggaacattccttgttggtcggtattcagtagcaggctgttgctgccgtagggatggatgtagttgacgttggcatgcagcagcaacggatggctccggagggcttggggtgtttccttgaatttgtgcgtatgtgtgtcgaacagtgctatctggcggtttccagccagccataggattccgttagcctgcatgaagaagtaggtgggagaaaagccctgcattgggatggagtcttccagcgccagtgtggaggagttgtagcggcgcagagacagtggggtcactgcccacagtttgttgctctggtctatgaaacagcggttgttgaaggtatagttcgggtcgaatatcttgatgggcacatcaaatttgtgtgtttgcggattatatacggcaaggttgtgcatcatgttcagaaaaatctttccgtctttgttctcaagtatctggatgccgttcttgtttgggaagtccagtgggatattttggaaattatctttgtctgtgtataggctggtcccatttacggtgactacccacaaccggccttgtgaatcgcggaagaggtcgttgatttgattatcgggtatatccagtgagtcatccgtacagtaatactgatgatattcgtgtacattatatttgtttacccctcgtgaagttcctatccaaatgtgtccttgtgcatcttcggcaaaggcggtgaccttctggttggagaggtcattggtgatgacagggctttcgatgctgccttccggtgcggtctttgtgtccgacgggttgcatgcggtgattaaacacaatagaagtaggtatttaatgtatttcataatatatagtgtagactaaaagcattgatatgtcatccatttgttttgttcaacaaatctctgcattgtgatgcgaaagtactcataaaaattgagagagagactgccggagagcatgttttgaacaaatctgcaaacatttgaacattggagaaagccgttttgaacatcggggaaagccgtttggatagcgtagaaaatacttctggggagaatgtgctaatattgcaatcataaaaacataaaactaatacattatatgaaaaagcaattcttgtctgtgttagcattctccgccatcctactttcctcgtgcggagggacagctaaaatagagagagtatctgcttgcgggcagaagggggagataacggcttcctctacggttgctgttgccgaaaccgaatcgggcaaagtagccggatatgtggagaacggtatctatatatataagggtatcccgtatgccaaagccgaacgttttatgccgcccgtggcagttgacaaatgggaaggtgtccgcagcagtcgtgcctatggccctacttgtccgcaaggcaagcgcatgggatggtacagcgacgaacaggcgtttgccttcaactgggatgacggttattctgacgagaattgtctgcgggtgaatatctggacaccgggactgaaagacgggaagaaacgccccgtcatggtgtggctgcatggtggaggttattccgccggcagtggtcaggagcttccctcgtatgacggaacaaatctggcaaagaaaggggatgcagtggttgtgacactgaatcatcgtctcaacgtcctgggttttctcgacctttccgcctatggcgataaatatgcaaaatcgggcaatgccggactgcttgacttggtggcggcactgcaatgggtgaataagaatatagaatcttttggcggagatgcccggaatgttaccattttcggtcagtccggtgggggaggcaaggtctctacgctgcttgccacaccgtcggcgagaggcttgttccataaagccattgtacaaagcggatctatgcttcgtacgatggagcagaaatactctcgtcgcattggcggtgcggttatggaggagctgggactgaatgcttcgcagatagatgaattacagaaagtaccttacgacaaattgcttgccgcaggcgaaaaggccgttgccaaaatgcgtgtagaggctgataaagaaggagtggcttcttttatctttggctgggctcccacggtagatggcgatgtgctgccagtacagcctttcgaccctcgggctccggtgcaaagcaaggacattccggtgatgataggcactaccctgcatgagtttaccgcaagcacttacttcccgcctttgcggagcatgacgaaggagcaggttgtggagcagattaaaaagaaatatggtgaacgtacggatgattttctgaaagcttttgagcaggcctaccccggttatcagcccaaggacctggtggatgtggacttcattttccgccccggcgcagtggagcaggccaaactgaagtcggcacagcaaggtgcaccggtctatatgtatatgtttgcttgggaatcacccgtgatggacggaatactccgcagcacgcattgtatggagattccttttgtgttcaacaatgtcgtgcgccatgcttcgatgaccggaggcggaaaggcggcacaagtgctggcggacaagatgagcagtgcgtggctgaactttgcccgtacggggaatcccaatactgaaggtttgcccgagtgggaaccttatacagctgataagggagcaacgatgattttcgataatgattgtggcatgaagtacaatcatgacaaggaactgcttgaggtggtgatgacctttccggtgcgtggattctgacatttttttaagagccctttttattattaacataaatctaatatttaatcaaatgaaacaaaatctgaaacaaacagctcgggagagatttgcggctatgacactcttcctattgatttgtctccctttcagtctggtacaagcccagacggtgaaggtgaatggtagagttactgatgacctgaacgaaccgatgattggcgtgagtatcgttgagaaaggtactgccaacggttgtattaccgacattgatggtaactatactctgaatgtgaagcaaggggctacccttgtgtattcttatatcggctatgtcgctcttgaacggaaagccgtagcgggagtaatgaacatcatcttaaaagaagattctcaggcattggacgaagtagttgtagtgggatatggtgtacagaagaaaagttcagtgacgggtgccatctcgcaggtgaagtccgaggatatccagaatcgttctataacccgtgccgaagaagccttacaaggcaagacggccggggtacagctggtgtctactacttctcagccgggttcatcacctactatccgtatccgtggtttctcttccaatggaacatctgaccccttgtatgtagtggatggacttatcgtcaacgatttaagctctatcgaccctaataatatcaagagtatggaggtattgaaggatgccgcttcggcagccatctatggtgcccaggctggtaatggtgttgtattgattacgaccaaaagtggaagtcagggtactagtagtatctcttacgatttccagtattctatcaacagcctagcacgtcgtcctgaattgttgaattctcaggagtaccttacacagatgaaggaagctgaccctacttttactgacgttaatattcgagagttgataagcaatggtgtatgggatggagtgtcgtcaacagattggtatgatgtggcatttaatgcttctcctgcttcccgtcatacagtcacctttcaaggtgccaatgacaaaggctcatatttcttgtcacttaataatttgtatgataatggtatcattcgtgaggaccgtgatacctacaagcgcctttctgtcatgctgaatgctgactacaagatcaagccttggctgaaagtgggtactactgccaattatgccaattatacgagcaaagccatcagtgatggtagtggtggaacttcttatgtaagtatgatagctactgttatgaccttggctccttacattgctgatacttatccggctgacgctttgcccacacagatgcaagcacagatagctaatggttttacacttttacagaatgccaatggtgattattacagctgtttgggtacaatggaacaagtacatccgatggtggctatccgtatgaacgacaagaagaatacgggcaacagcctgatgggtaccctatatgccaattttactccgattaaggatttagtgttcaccactcgtttgggttatcgtattgccacggataatacttacactcacaacaatttgtattatggttctgcctcagcttcaaataaagacagaaacggcgtaactcgcaccagcttatctactacttattaccaatgggagaactttgtcaactataataccaccttgttggatacacataatatctctgccatgttgggtatgtcttattcgcagtctgaccagatttatgtgtctgctggtgtagacaagatagccaaagataaccttttgtatgcggatgtggactggccggccggcgatgcggtaaaaagtaccggtggacataattatatttaccgcaaactgtcttactttggtcgtgtgggttatgactataagaaccgctacatggctcagtttgccatgcgtgctgacgctgctgatgcttctgtattgcctccgacgaatcgctggggatactttccttctgcttcggtgggatggactatatccaatgaagacttttttgcagagaacaatcacactcctattacatttctgaaagtgaggagcagttggggacagaatggtagtacaagtaatctgagtgggtataaatattctaatgccttgattacgaatgcagctgggtatcctttcagcaatagtaaaataaattatatgacatctgctcagccttcccaactttataatcctgatttgaagtgggaaacttctgagcaattgaatattggtcttgaccttcgcgctttcaaggaccgcttttctttgagtatggattggtataagaagaaaacgaaagatttgattgtatctaacattattattccgtatgaggcaggaaattctgctgctcctatgaatgctggtaatgtagtaaatgaaggttttgagctggaagcttcttggcgcgataatattggagattttagctattcggtttcaggaaacatcgctacgttgaagaatgaagttacttaccttgatccacacgttagtggtggacgtattgaaggaagtactacaatggcttccaatggttcattctctgcttttgaggaaggttttccggtatggtatttccgtggttatcaagtagaccatttgaatgaaaacggtgatcccgtattcagagataatgatggtaatggttctatcaatgccaatgacaaggctatgattggcaaaccaatgccggattttacttatggtcttacgttgacagccagctacaaaaactttgacttgtcggtatttggtaatgggtcggtaggtaatgatgtgtttatgtcctacagctataaccggattctgtattcgttgaaagagatgtacgatcagcgttggacgccacaaaatctttctgccaaatatgctcgtccgcaactgacgaatgcggataaatacggtttgtctgatgcttatgttttcgatggctcttatttccgtatcaagcaaattcagttgggatataccttcccaaaacaatggacaaagaagatcatgatagacaacttacgtgtctatgcatctttggataactttttcttgtttaccaaatatcctggactcgatcctgaagtgtcttctactaccacaagtggtatgggggtagactatggtaactatccgacaacaaaaaaggtagtatttggattatcggtaacattttaatatataaccttttgaatattaataaacttatgaaaagagaaatattattgggattaatggcaggtgtgatctcgtttacatcttgcgacgttgacttattggacattccacagcaaggtgtgacaaatgaagaggctttttataaaactgaccaggattgtgaagaggctattgctgccgtttatcgttcgtggcgtacggctttctccggaggtcatggaggagcttcgcaatatgccaacggctttttcgtgaagaatcttttggcagatgattttaatacaggaggttcacgatcagaccagacttatgcacaggaaatatttgaaagtgcagccatgcctactaatggctggatagagacttattataaggatttgtatactacgatctatttatgtaacctggtgatagaaaaattcaattcagaggacagtgtcattaaagctcgcaacattgctgaagctaagttctatcgtgcgctttgctattttgaactgactactctttggggtaatcctcctttggtagatagggtgttgaagaattcggaagaatataaagtgtctaattctacacgtgaaaaattgtgggagtttattgaaacagatttgacggaagctattaattccggtgtgcttacttcgaaaactagtgtggatgataaggatggatgtacccgtgctactttggaagcagccaagacattattgggcaagtcttacttataccaacaaaaatttactgatgctaaaagtctgttcaaggatgttattggttctggtaagtatgatttggaagacgatatcaatattttctatcatacagcaggaaatggaagtaaggaatatgtattggagtgtacccgtcattatgatactgctaatatgtatgcacaaggtggctggtatggtattttggctaactgggcgtttggttatgggtttatagcaggtccggaatcgtcctctcattttagatttaatgcaaccagtggctatagttatttcaatcctactaaatcgttgtatgaggcttatgtagcagaagaaggagtggatgggtatcgtgtaagtagctggattcgtacctttgaacaagttgtaggaatgaacattggtataaattctacagcaaatagatatggcaatgagggctatttccgtttgaaatggttggcaagcttagatgacgaaaatgtgtcatattggtgcggtaatcagagctgtacaccggttattcgctatgctgatgtcttgctgatgatggcagaatgctgtattcaaacaaacgatcctgatgccgatatttatctgaataaagtacgtacaagagctcaattgccttctaagtcaaatgttacgatggatgacttaaagctggaacgtcggttagaacttgctatggaagcagtgcgtttccaagacttgatacgttggggagatgcacctattgtgttggctgataaaggtaagaaattgccaaacttccttatagttcctaaagaaggaaatgatttgactactgctaaaggtatatataatgctcagtatgatacttctgtatcttatacagagaatgaaagagaattggcaggttggacacctaatcgtgatgaattactgccatatccggaaaatgagattgaggtaaatcctaatattgttcaaaacccgggatattgatgtggattgatgatatagcctctctctttttgctggggggaggctgtctctagtttatatgaaagttgattatgtagtttataatgtattatctgtgtcgagagattcttaaatatatgattatgaagaaaggtttattatttatagttgttctattttcttttgtgggaacatggtcacaagttgttttcaagaatgatgaggtgactgtatctaagctgaaagataaaacatgggtgtttgaaacatgggattttactactatgtatttgttggagggtaatgataaagctgcattgattgatgcgggtactcgttgcgctgatttggataagattgtagagagtatcactaataaaccttatgatgtcattatcactcacgcacatccggatcatgctgggtgtatcggctatttcgacgaggtttggatgcatcgtaacgatagtatacttatcaaggaacgaacagtgaactatactggtaaggtacgttatatggaggaaggacaagtatttgatttgggaggacgtaaactggaagttatgctgatggcaggacatacaccgggttctattgttcttcttgaccgtgaacaaggagattgttattcgggtgatgctttcggctcaggagaggtatggttgcaatgtgtaccaatgtctccaatagaaactttttatcaatcttgttgtcgtatggagaaactgatgacggatggaagtatcagtagaatatggtgtggacattatccatatttaaagaattatctgtctctaagctatattcagactatgaaaaaaatgtcccgccggttggctgatggagaacaaaatggagccagaccatacaataattttgcaattccgcaaccctctacaactcgtagcatatctgacggtttttgcaagattgtttatgatgtcagaaacattgtcattaaaaggaaaagtattgacccgcatcatgcaattatattggatcgtctccccaaagtagagcaagaagcatatatgtatcgtgatacttgtacgcaggttgatggccgttttgcgggcttttctccttttttccttatatatccggataaacgttgtgacgtaactcaagctgaatccttgattaaggagatggggatggatagtattctacataaattttctgcatcggtatgtgttatgaatcctttgggtaatacttatgatatggaaaaagatttgtcggctttccaaactttttttaaaggtatgcgtgttgttaataatctaaaagttataggtattggacaaggagcaacttttgtgaacaaggccatagcacggaacgctgaggctgtggctggtatagttactattggcggtaatcctggcaagtatgaactagacgattgtcctgtaccgacattcgttgctggtgctagaagtaaacaggtgaccaactcttatgtaaaacttaataaggctgttaagactgcagtaaagggcaacctaacattctatgtcaatacagatgaagaactgttgcaagtagtttcatcgagcgatacaagtgcgtcgttgaaagagacttttttggaagcttgggttcaagtgttgtctaaaaactatcgttttaataattataaacatacatggtatatgggaggtactcctgaaaagtatggaacttatgagcttgaaccatatatcatgcctgaagagtgggggataactcggcgggttatggaaacgaatttgctgggtactggaacttttttgtggtatgaatttcatcctgaagcaacattgaaagcgcctagaggaactgtacctttattgctcttgctgcatggcaatgagaatgatccgcgtacacaagctgagacctcaggtttcattgaactctgcgcaaaagaaaattttgtagttgtggaacttgaatggcagggtagtaaagattatgcccggatgggtatggatggtattgaacaggttgtatattatttgttgaagacttatcctcagcttgatgcttcacgtgtctacacagaaggtttgtctgctggatctgccacttctacaggattaggaatacgaaaatcatatctgtttgctgcggtaggtggcttttcggcaggtatattgcctggaagttaccggtttgattgtgatcggcaatctttgttgggtgaagcgatccaaaagagtggtgcagtagaaatgccctatttttctgcaacaggaaccagtgatactgtagtaccatttataaataaagataattggcagaagaatgctttttttgctgcatggcaaatatatcagattatgaatggtatgtcggttacagaacgtccagattttagtaaggacactatttttggtattactcttgagaatcgtgaaacaatttggacgaataaaggtatttcgatggaaactggtgtgttgagtaaaaatggggtacctcttattcagatggttgcggtcaatgattatggacattggaattttaaacctgcagcaaaaatgatgtgggattattttatgcaattctcacgtgatccacaaacgaaggagcttatttatcatggaagaaaataataaagttgatgtcttgatataatatatagtgaagtattagagatgttttataaaaatgatgcgaaataggtatcttttttattgaaacaacggtcttccctcccacctaacttagattgcttgtacgtgaatgtatgggtgacggcgatgaacgatggtacgaagctaaactaataattaaattaatttgtaaatgaaaaaataaagaatatgaacttgaggcggtatatgttatttgccgtactgcttctgtattgtctctctttcagttaggcgcaaacctaagccttgaaagtggcaggtatagtgacagacaacctaaatgaacagatgattggtgtaagtattctggagaaaggcactactaacgcttgtattaccaatattgacggtgattactttttgaatgtgaagaatactggtaagctaatggaacgtgatgggcatggcttccttcaacgataaaatcaatgcttgggagttggcaaaaggtgaatacaagtggatggtagctgcctcctttgcagacatacgttgtatcgtcacccaaaaggttgccaaagcacgcaaggataaggcaaacgatgcaatgaagctgctgttgtcttgaatgaggttagagctagcggtaagtataaactttatgatggaaattatgaggatatcttgacctacaaggctgagtataattgtgaaagtatgctcgaaagtaaccgtatttttgatgcaagtaattctatggatgagttcagtttctttgaggtgatgaatcattggcgcactgataagttggatatgtctggctctaacaatcagtttaatggtaccggatggggatttatggttcctcagaaaaagttgtatgatgcatttgttcaggaagagggtgtagatggttatcggttgaatcagacaatgaaaacctatgaccaaattactcaattgggtgtcaaggttgccaaagggcagagtttgattaatgaaggttatttcatgtggaaacgtcgcttctcgaatgtagaatctcctgctgggttctggtgttcatataataactatcgttggatgcgttatgctgaagtcttgttactggcagctgaagcaaacctgaaggatggcaatcaatccgaagctgatgcttgcttgaatgaggtgcgtcagcgtgcaagattggatgctaagacagctaccctggatgccattaaattggaaaagagactggaactctgttctgaatatacccgttatcaggatattatccgttggaaagatgcggaggctttgcttaaggatcagggtgaaagaacacctatcttgtcaaataaggcaggaaaagatgagccggataatgtagcggtagaatacattcagtataacaaggataaaacgcgttatggtttcaaggaaagacattatttgttgcctattccggcaaaggagatccgcttgaatccgaatatggaacaaaatgcaggttggtaaagcgtataaagaatcaaaatctaacttcgtcgtctgatgcagataaacaaaattagatttttctaactgattaattgtttgtagaagaagtcccccgtgggaatcagctaattgtacgggggcttcttttgtggctttttaaatataatatatatgagaagattgtcaattactttattttcactctgtctggcatctgccttgactgcacagacgaccggttcgaatcagtcagtcagactgcgtgccgacaatatcgacgaagtggtcagtgctatgaccctcgaagagaaggtacacctcgtcattggttgtgggatgtcgatgggaagtgataccaagtttcccggaacagcgggacgtacttacgacattccccgactgggtatcccttccgcctatcttgccgacggaccgcaccggttggcgatggctgccaagcgggaattcgacagccgtacttatcatgctacggaattcccttccagcaccacggtggcagctactttcaatccggatgcagcccataaggtgggacgtactttgggtatggaagtgaaggattatggtttggatgtgttgctggcaccgggtgtcaacctgatgcgaaatgtgctttgcggacgtaaccatgaatattattcggaagatccggtgttggctggtaaaatggctgctgcctatatcaacggagtccagagccgggggacaggtacctgcctgaaacactttgccgtaaacaaccaggagaccaaccgcaataacaacgactctcgcctgacacagcgccccttgcgcgagctgtatttgaagtgcttcgagattgctgtcaaagagtctcagccctggagcgtgatgaccgcctacaataaggtgaacggcaaatatacctgcgaggaccgcgaactgacagaagacatcctccgcgacgaatggggattcaagggactggtgatgtccgactggaatgccggaaaagatgccgtgacctccatcgtagcaggaaacgacatgcttcaaccggggcaagaccgccagtataaagctattttggaagccgtagagaacggtacactggatttggcactcctcgaccgcagcgtgaagcgtgtgctggagtttgtggtcaagagccatacctttgccggctacgagtatcccaataaaaccgacttggaggctcatgcgcaagtagaccgtgagataggtgcggaaggtatcgtgctgctggataacaagcaggcgctacccatggctgccggcatcaaaaaagtggccctttatggaactacttcctatgacatggttcctgccggcatgggctttggcagtacgggcatcggttattacacggtttctatggtagaaggtttgcgcaatgcgggctacaccgtggacaaagaattgctgaaccgctacaagaagcatatggccgacgagcagaaacggctttttcctcacggaaaaccgcctttcgcctttactccgctgccccgtgccgaggagttcctgcccactgccgaggaactggctgcacaagtgaaagccaacgacattgccgtgcttacgctggggcgtgtcagtggcgagggctgtgaccgccgtgtggaagatttcctcctgaaggagaacgaattggctctgattaagcaagtgtctgccgcttatcgtgctgcaggcaagaaactggtggtggttctcaacatctgcagcccggtggagactgcttcttggaagggactggcagatgcagtggtttgtgccttccagccgggacaagaggtgggtaattgtatcacggacatcctgaccggaaaggtgaatccttcgggcaagttacccatgacgtttgccgtgaaatatggcgatgcgccgtcggatgctaacttcccttttgattacgagttcaagatgccgtcgtttgctatgggtaccggcatgaacttcaagtccgaaaagaaagaggagaaaccgaaggaaccggagaaaaatgtggatttcaccaactatgaagagggaatctatgtgggttatcgctatttcgacactttcggtaaagaggtttcctatccgttcggtcatggtttgagctatactgcttttgactatgcggtagagaacgccaaaatggatgccgatcgctgtgagttgaaagtgagcgtgaagaacatcggcaaggtggcagggcgtgaagctgtacaactctatgtgaaagctccgaatgggggacttgacaagcctgccaaggagttgaaggccttcggcaaaactgccttgctccagccgggcgagagccagacactgattctgacttggaacgtgatggacatggcttcctttaatgagaaaaacagctcttgggagttggctaagggtgaatatcagtggatggttgccgcatcttcggccgatgtgcgttgcacagcggtacagagggtgacaaaggcacgcaagcagaaagtgcatgatgccatgcgggcgcaagtgcctgtggctgtgtatccgatggtgaagagatgaggggggatatgcgtgaaaaaactgatatatatcaattagttttagagtggaaaacgcttattttgtagtacatttttaaatcgataccatgaaaagattgatactctctcttttagccgtctgcttgctgtggatggcaaatgcacaaaatcctgcatggggaccgcaaagcaaggtagtgaccgacagcatctacagccaggtattgaaagcacaccgtgcctacaccatctatctgccgcaaagctatagcaatgaaacggataggaaatatcctatcctctatttgctgcacggcatgtcgggggtgaataccagttggtttacagaccaacgtgtgaaggacgtgatggaccagttggtggcatcgggcgaggcttgcgagatgattatcgtcagccccaatgcaggaggtaatccggccacttgctggaacggctacttcaacatgccgggatgggcttacgaagatttcttctataaggagttccttccttatatagagaagacctaccgggtgaaaggtgataagcagcatcgtgccattgccggactttctatgggcggaggtggaacgacgagctatgcacaacgctatccggatatgtattgtgctgcctatgccatgagtgctttgatgaacatccccgtcagtggtgaggaggtgggaaaagatcccgaccccacaaacaagatggctgtgctgacgcgttctgtgcaggaacatagttgcatcaggtatgtggttgaggcagatgatgcgcgtaaggcacagcttcgtacagtacagtggtttgtggattgcggagatgatgactttctgctggaccgtaatatagagtttttccaagcgatgcgtaatgccggtatcccttgccagttccgtgtgcgggatggcggacataccagcgaatattggcattcggcactttatatgtgcctgccttttgtaagtcgcagctttgctaaataacaaaaagctaattcatttaatataagaaattatgaaaagattattaagttcggcagcgatgctgctggtctgctgtgtcaccctttttgcacagcaagctctttggggaggtgcggcggttgtctctcctgatattcatgatgacaacacggttacttttcgcttgaaagctcctaaggctgtaagggtgcagattactggtgattttctgcctccacaaactattaagactcctcgtggcgattatgatgcaccgggcattgccgatttgacagaggggaaggacggcgtttgggaatttactactcccgaaccgttgaagccggaactttatggatattcctttattgtagacggattgagaatgatggacccgagcaatgtttacatgattcgggatgtggctaccgtgaccaatgtatttatcatcggtggggaccatgccgatttgtataaagtgaataaggtacctcatggaacggtaagtcgcatgtggtacaatagtccttcgctgggaatggaccgccgtctgacgatttacactccggctggttatgaaaccagtggcaagcgttatccggtattttatctgcttcatggtgcaggtggtgatgaggaagcttggattgctcttggccgtacttcgcagatattggataatctcattgcacaaggcaaggctaaacctatgattgtggtgatgactaacggcaatgcttggcaagatgctgctgcaggtgaatctcccaagggttttgttgccccgtccatgcgtcccgacgaaagagcgaaggtggcagaaggtgcttttgaactctcgtttcccgaaatcgtgaagttcgtggagaagaatttccgcactcttgccaataagaagaaccgtgccattgccgggctttctatgggtagtttccactcttgcaatatttccaagtattacccggacatgttcgactatgtaggtcttttctccggtgcaagtaccgggaacgataaatcaacttgtccggtctataccgactttgaaggtaagctgaagactcagtttgccaaaaaaccggctctttacttcatcgcatgcggcaagacggactttgtttataaaggtgtggccgactttcgcaagttgcttgacgacaatggttataagtacgagtatcttgaaacgggcgagggacatatctggaggaactggcgaatctatctgacggagttcgcgccgaagttgttcaaataagaggatttggtataactaatttaataacaaaataacatacgtatcatgaaaagaatttctattttgtcagctctgttgctgatgtgtgcgatgactttcgcgcaacaagctctctggggaggcgctcctgtggtctcacctgagatacacgacaacaatacagtaactttccgcttgaaggcgccgaaagccgtaaaggtgcaagtaaccggcgacttcctgcctacgcagaaaatcaagactccttttggtgagtttgatggtccgggtgtggcagatttgaaagagaacaaggacggtgtgtgggaattcactactcccgaaccgctgaaaccggaactctacagctacacttttctggtagacggactgaagattaatgaccctgccaacgtctatatgattcgagacgtggcaagcgtgacgaatgtattcatcatcggtggtgacgagcgcatcgacctctacaaagtgaataaggttcctcatggaacggtatctaaggtatggtacaacagccctacgctgggtatggaccgccgcctgactgtctatacgcctgccggatatgagacaagcggtaagcgctaccccgtcttctacctgctacacggcatgggtggcgacgagaacgcatggagcgaactgggacgtacggcacagattctggataacctcatcgcccaaggcaaggccaagccgatgattgtagtaatgaccaacggtaacgctgcgttggaggctgctccgggtgaatcgtcactgggttttgccgctcccagcatgaatctgcccaagacaatggaaggttctttcgaaacggctttccccgacgtggtgaaattcattgataagacttaccgtacacaggccaacaagaaggggcgtgccattgctggtctctctatgggaggtttccactccatgcacatctccaagcaatatccggacatgttcgactatgtagggctgttctcggctgccatcatgcccaacaaagatgtgaagtctccgatttatgacaaccttgaagccaaactgaaaacccagtttgccaagaaaccggcactctattacatcgctatcggtaacaaagacttcttgttccaggccaataacgactaccgcaagatgttggacgagaagggttacaagtatgaatattatgaaaccggcgaaggtcatatctggaagaactggcgtatctacttgacagaattcgcaccgaaattatttaaatagaatgatgaagaagaatcttgtatcaatggcagccgtagcggttgttttgtcagcttgcggaccgggtgtgccgcagcttggaaagtcctctctggatgaggtgattggcgccatgaccttggaagaaaaggcgcatctggtagtgggtaccggtatggcaggcttctcgggtgacagtgccgtaatcggtgcaacgagaaagctggtgccgggtgcggcaggaaccacatatccgattgagcgccttggcattcccgctgtggtgctggctgatggtccagccggactgcgtatcgaccccaagcgtgagggagattctgctacgtactattgtactcatttccctatcggaactttgctcgcctctacctgggaccaggaactggtggaaagtgtaggtcagtctatcggtaacgaagtgctggaatacggtgcggacgtgctgttggctccggcgctgaacattcaccgtaacccgctttgcggacgtaacttcgagtattattctgaagacccgttggtgtcgggtaagattgccgccgcctacgtacgtggtgtgcagagcaacggtgtgggtaccagtatcaagcactttgctgtgaacaaccaggaaaccaaccgtatggctacggatgcgcatgtatctccacgcgccttgcgcgaaatctacttgaaaggattcgagattgccgtgaaggaatccgctccttggaccgtgatgtcctcatacaactacctgaacggtgtctacacttcggaaaacaaggagttgcagacaaccatgttgcgcgacgaatggggcttcaagggcatggtgatgaccgactggtttggcggcaaggatgccgtggcacagatggtggcaggcaacgacatgttgcagcccggtctgcccaagcagtacgaagccatcgtgaagggtgtgcaggacggagcgttggacgaagccatcctcaatcagaatgtgaagcgtattctggagatgattctccagactccccacttcaagggatataaatactccaacaagcctgatttgaaggcgcatgctgccgtaacccgccagtcggcaacggaaggcatggtattgctgaagaacgataacggtgctctgccgctggctgccgacgtgaagaacgtggcactcttcggttgcacttcctacgatttcattgcaggcggtacaggttcgggcaatgtgaaccgcgcttataccgtttcgctattagacggcttgaagaatgccggctatgtggtggatgaagcgctgaagaatagctatgaagcttacctgaaaaccgagaaagaacgtctgtccaaagataagaaagagtggttcatgcccgatacccgtccggctgagatggctgtttccgcacaagtcatccgcgagcaggctgccaaggccgatgtggcactggtgacgctgggacgtacctccggtgagtttctcgaccgtatggtagccgacttcaacctcaccaaagaggagcagagcatgttgaaagcagtgtccgatgctttccacgctgccggaaagaaggtagtggtggtacttaatatcggtggtgtgattgaaactgcttcttggaagtctgttcccgatgccatcctttgtgcatggcaggcaggccaggagggaggaaacagtgtggctgacgtgctgagtggcaaggcttctccttcgggcaagctgacaatgactttcccggtgaagtttgaagatgccgcttcttccgccaacttcccgatagacatgcgcgtaagcaccgacctcgtgaacaagggcgggaagaagaacgacgtgaaggatgtggattataccaattatgaggaggatatctacgtaggttaccgttactttgacacctttggcaagcaggtttcctatcctttcggttacggtctttcctataccacttttgcttatgacaaggctgctgtcaaggcagacaacggcgtctataccgtatctgtggaagtgaagaacaccggtaaggtagcaggtaaggaagtggttcagctttatgtatccgctcccgatgctgcagacgccaacaaacccgaaaaggaactgaaagcttttgccaagactaaggaactgaaaccgggcgaaactactgtggtgacgctgaaagtgaatgctgccgacctggcttcctatgatgaggctgcatcggcatgggtggtaactcccggaaactacaagttcctcgtcggggcttcctcacgcgacatcaaggctacgctggaggctgaagtagctgccgcaacgcagaagacgaacgacatcctgaaacttcaggaaccgatgaacctcttgaagagatgagagtaggattgtctgaaaagataacaaatcataccctaaaaaacatcctgttgtatcctttggtatggcaggatgttcttatctttgtgcctcgtataaacagatagtgcaactattataaaccaatatcacaaccatgagtaaaaagttaatcttatctttagccctatcagggttagtacttactgctacggcgcagaccactgttgcgcctgccattccaagagacgagaaaatagaacagcagattgagactttgctgaagaagatgacgcttgacgagaaagtcggtcagatgtgcgaactcactatcgacctcctgcagaaacgcgccaatccctttgccggtctcgacccgaagaacatcacggtgaaggacctgcaaaaaatcatcaagagatacaagcttgaaaaggaattcaagctgggcaaggagatgccttcgcaggatgtgatgatgaagctctatatgcgtatccaaggcattgagaatgccaagggcttccagttggacgaggcgatgctcgactctgtcatcggaaaatacaaagtaggctccatcttgaacgtgcccaacggtgtggcacagagcgtggagaagtggcaggaaatcatcaaacgcattcaggagaaatccatggaggtgatgggtattccttgtgtgtacggtgtagaccagatacacggaactacctatacgctgggcggtactttctttccgcaaggcgtcaatatgggagctaccttcaatcgtgaactgacacgtgagggtgcacgtatctctgcctacgaaacaaaggcgggaagcatcccctggacgtatgccccggtgaccgacctcggacgtgacccgcgctggccgcgtatgtgggaaaactatggtgaagacgcctacgtcaatgccgaaatgggacgtgaagccattatcggtttccagggagagaaccccaacctgattggcgggaacaacgttgccgcttgtatgaagcattatatgggttatggtgtccccgtttccggtaaggaccgtacgccgtcttccatcaccgagcaggatatgcgtgagaagcattttgctccttatctggaaatggtgaaggcaggtgccctctccgtgatggtgaactccgccatgaacaacggcctgcctttccatgccaactatgagctgctgaccaagtggctgaaaaaagacctcaactgggacggtatgatcgtgaccgactgggcggacattaacaacctttatagccgcgaccacattgccaaggacaagaaggaagccatcaagctcgccatcaatgccggtatcgacatgtctatggacccgtacgactggaagttctgtacactcttgaaagaactggtggaagaaggtgaagttcccatgagccgtatagacgatgctgtgcgtcgtgtgctgcgtttgaaatgccgtctcaacctatttgaaaagccctattatgacttgaaagacttcccgttgttcggtagtgcggaacatgccgctgctgcattgcaggctgccgaagagtctttggtactcctgaagaatacagacggtatattgccgttggcaaaaggcaagaaactgctggttaccggtccgaatgccaactccatgcgttgcctcaatggcggctggtcttattcatggcagggcgacaaggccgacgagcatgcaggtcaatataataccattctcgaggctttcaccaataaattcggtgcggacaatatcatctacgaagccggtgtcacttataagcaaggtggcaactggtgggaagaaaacactccggagatagagaaagctgtagcagccgctgccggtgccgactacatcgttgcctgcatcggtgagaactcttactgcgagactccgggtaacctgacgaacctcttcctctcccagaaccagctcgatttggtgaaggctcttgccaaaaccgggaagcccatcattctggtgttgaatgaaggccgtcctcgcctgattgctgacatcgagcctttggctaaggctgttgtcaatactatgcttccgggcaattacggcggtgatgcgttggcaaacctcattgccggcgacgccaacttcagcggaaagatgcctttcacttatccgaaggaaatcaactctctgattacgtacgactacaaaccgtgcgaacacatcggaaagcagatggaaggcgcttataactacgatgcgcaagtatctgtacagtgggcgttcggttatggattgagttatactacttttgcatacagtaacctcaaggtggataagtcggactttaccgctgatgatgtgcttactttcactgtagatgtgaagaataccggtgaccgtgtcggcaaggagagcgtgttgctcttcagcagtgacctcgttgcctcccttactcccgatacccgccgtcttcgcgctttcgagaaagtggaactgaaaccgggcgagacaaagaccgtgactctgaaactgaaaggctccgaccttgctttcgtaggctatgatggcaagtggattctggagaaaggtgacttccgcatccagacgggtgaccagactgtgaacgtggtttgtacggataccaagaagtgggagactccgaataagtgatacgacaaggtcttttagacctttagaaccatagtaaaagggccgatagcatgaaacaagctatcggccttttatttttccgcgttgtctttcaacagtatcttttttccgcttgtacctccttacttcttttcctgaaacaatagagattgtacgcatgagatgtacatctcatgttgttcgagatgtacatctcgttgtgcttgacatgtgcatctcatgcagtatggaacgtgataattcatttcataaagtataagcttctgtctcataagattatatgttttaccccttatcttgaagtgttgaaagggcgtgtctgtaatataattcccgtttgaaccgttaaatcaatctttttttctctaatattttgtagtcgaacagattatttatatctttgcaagcgaaaacggatgaaaggtggaggggcgattaagctcctcttttttgttcctaatggttaatctatgatagaaaagaaaactgtttgtcagattgttgacgagtggctggcaggaaaggactacttccttgtggaggtgacaatcagcccggatgacaagattttggtggaaatagaccacaaagaaggtgtttggattgaggactgcgtagagctgagccgctacatcgagtccaagttgaaccgtgaggatgaggattatgagttggaagtcggttcggccggcatcggacagcccttcaaggtactgcagcagtacattaaccacatcggcaaggaagtggaagtgctgacaaaggacggccgcaagctcagcggcgtgttgaaggaagccgacgaacagcatttcgtcgtgaccattcagaagaaagtgaaagaggaaggtgccaagcgtcccaagctggtggacgaggacttgacctttacgtatgaagagataaaatacactaaatacttaatcagttttaaataagactatggccaaaaaagtagaaactgtcagcttgatagatacattttcggaatttaaggaactgaagaatatcgacagaaccacgatggtaagcgtactcgaggagtcgttccgtagtgtgattgcgaaaatgttcggtaccgatgagaattacgacgtaattgtaaacccggacaagggtgatttcgaaatatggcgtaaccgtgaggtagtggcagacgaggatttggaaaacccgaacctgcagattgcattgtccgaagcacaaaagattgatgcttcttatgaggtgggcgaggaagtgacggatgaagttattttcgcgaactttggtcgccgtgccatcttgaacttgcgccagacgttggcctccaagatattggaactggagaaagatagtatttacaacaaatacattgataaggtgggtaccatcatcaatgcggaagtctaccagatttggaagaaggagatgctgctgctcgatgatgaaggcaacgaactgttgctgcccaagaccgaacagataccgagtgacttctaccgcaagggcgagactgcccgcgccgtagtggcacgtgtggacaacaagaataataatccgaagattatcctgagccgtacgtcgcccgtcttcctgcaacgtctgttcgagatggaagtacccgaaatcaatgacggactgattaccatcaagaagattgcccgcatccctggcgagcgtgccaagattgccgttgagagctacgatgaccgtatcgacccggtaggtgcctgcgtgggcgtgaagggtagccgtattcatggtatcgtccgcgagcttcgcaacgagaatatcgacgttatcaactatacgtcgaatatccagttgtttatacagcgtgccttgagccctgccaagatttcttctatccgcttgaacgaggaagaacgcaaggcggaagtgttcctgaaacccgaagaggtgtcgctggctatcggtaaaggcggtttgaatatcaagcttgccagtatgttgactgagtacaccatcgacgtgttccgtgagttggatgaggccatagaggatgaagacatctacttggacgaattccgtgatgagatagacggttgggttatcgatgccatcaaggctatcggtatcgatacggcaaaggctgtgttgaatgctccccgtgagatgttgattgagaagacggacctcgaagaagagacggtggacgaggtattgcgcattttgaaacaagagtttgaagaggaggagcagtaatgtggtaatgtgggtagtatgctaatgtgccaatgcagatagcatatcggatgaagtgcacactccttttttctcagccaattagcacattagcatattggcacattaattcattaaattagtatgacgataaggttaaacaaagtaacaagagatttaaatgtaggaattacgacggctgtcgagttcctgcaaaagaagggatttaccgttgaggcaaatccgaacacaaaaattacggatgaacagttcgaactgctcaaaaaggagtttagtacagataaggaccttaagataaagtcggagcgtttcagccaggaacgtcagagcaaggatcgcaacaaggcgtccgtgtctattgacggctataaggaaacgcaagagaaagcgaagcccgaggagattaagacggttgttccggaagacgtacgtccgaagttcaagccggtaggcaagattgatttggacaaactgaatcgtagacctgctcctgctcaagaaaaagagaaagaaacggaaaaagcaatagaagagaaaaaggtggaggaaccggcagttgtagaaacaccgaaaccggaaccagctcctcaaccggagatacagccggcatctgaacccgaactgcaatccgtttcggaaccgcagccccaacccgttgtcaaggaagagcctgctccggtgtcagaggctcaacaagaatctaaaaaggaagaaatgatagaagcgcctgctcccacaccggcggctgaagaagcaccggttgaaaaagaggggaaagaagaaggggaagaaatcttcaagatacatcagcctgagtttgtttcgaagattaatgtcatcggacagatagacctggctgccttgaaccagtccacacgtccgaagaagaaatcgaaagaggagaaatgcaaggagcgtgaagagaaggaaaagattcgccaggatcagaagaagcagatgaaggaagctatcatcaaggaaatccgccgtgatgatagcaagctgaaggataccgctgccggcgatgccaatggcaaaaagaaacgtgtccgtatcaataaggagaaagtggacatcaacaatgcttccaacttccaacgtggtggtaacgatcgtggacacgcaggtgcccagcaaggtcaggggggccgcccgcaaggtggaaaccagcctggtggaaacaatgccaataataaccgcaaccgcaataaggaccgcttcaagaagccggtcatcaagcaggaggttagcgaggaagatgtagcaaagcaggtaaaggaaactttggcacgcctcacttccaaaggaaagaacaaaggtgccaagtatcgtaaggagaaacgtgacatggcttccagccgtatgcaggaattggaagacatggagatggcagaaagcaaggtactgaagattacggaattcgtgacggccaatgagttggcaagcatgatggatgtttcagttactcaggtcattgccacttgtatgagtattggtatgatggtatccatcaaccagcgtctggatgccgagaccatcaacctggtggctgaggaattcggtttcaagacagaatatgtaagtgcagaagtggcgcaggccatcgtagaggaagaggatgatgaggaagatttggaacctcgcgctccgattgtaacggtgatggggcacgtagaccacggtaagacttcattgctcgactatatccgtaaggcgaatgtgattgccggtgaagcgggtggtatcacacagcacatcggtgcctaccacgtgtcactggatgacggacgtaagattacattcctcgatactccgggtcacgaagcgtttactgccatgcgtgcccgtggtgccaaagctacggatattgccattatcattgtggctgctgacgacaacgtgatgccgcagacaaaggaagccatcaaccatgccatggctgcgggtgttcccatcgtatttgcaatcaataagattgataaaccgactgccaaccccgacaagattaaggaagagctggctgccatgaacttcctggtggaagagtggggcggtaagtatcagtcgcaagatatctctgccaaaaagggtatcggtgtacccgagctgatggagaaagtgttgctcgaagcggaaatgctggagctgaaagcaaacccgaaccgccgtgctaccggttccatcattgagtcctcattggataaggggcgtggctatgtggctacggtgcttgtttccaacggtactttgaagatgggcgacatcgtgttggcaggtactaactacggtaaggtaaaggctatgttcaacgagcgtaaccagcgcatgaaggaagccggtccttctacacctgccctgatattgggcttgaatggtgcgcctgctgctggcgatacgttccacgtaatcgagacggagcaggaagcacgcgagattgccaacaagcgcgaacaattgcagcgtgaacaaggtctgcgtacgcagaagatgctgacgctcgacgaagtgggccgccgtctggcactgggtgacttccatgagctgaacgtgattgtgaagggtgacgtggacggttctgtggaagcgttgagcgactctttaatcaagttgtctacggagcaggtgcaggtaaacgtaattcacaagggtgtcggtcagatttccgaatcggatgtctcgctggctgccgcttcggatgcgattatcgtcggcttccaggtacgtccttcgggtgctgccgccaagatggcagagcaggagggggtggatatccgcaagtactccgtcatctacgatgccatcgaagaggtgaaggctgccatggaaggtatgctggcaccaacattgaaggagcaggttacagcaaccatcgaggtgcgcgaggtgttcaacatcacgaaggtgggactggtggcaggtgccatggtcaagaccggaaaggtgaaacgcagcgacaaggcccgcttgatacgcgacggtatcgtaatctttacgggtgccatcaatgccttgaagcgcttcaaggacgacgtgaaggaggtaggtaccaacttcgagtgcggtatcagcctgacaaattgcaacgacatcaaggtgggcgatattatcgaatcttacgaagaaatagaagtgaagcaaacattataattgaataatgtgcaaatatgctaatgtgccaattggctgcgcgtaaagaaaatgccgcagggcaattggcacattttgcatatcagccatttgctcattagcatattggcacattaccacattatcacattaatctatggcaattatagatatcatcatattggtagcttttggcttgggcgcaatcattggcttcatgaaaggttttgtgaagcaattggcctctctgctggggctgattgtcggtctgctggcagcaaaggctttgtatgcctcgttggcagcgaagctgtgccccacattgacagactctatgacagtggcgcaagtactggcatttgtcctcatctggctggctgttcccttgctcttctccctggtggcttctctgctgacccgggcaatggaggccgtctcgctgggctggctcaatcattggttgggagccggtctgggggctttgaagtacctcctgttgacgagcctgctgattggtgtcatcgaatttatagacggagacaatacgctgattggcaaaacaaaaaagaaagaatcagtgttatattatcctatggaagagtttgccgggatattctttcccgcggcaaaggcggttacggagcagattgtaaacggagactttgactgataccgtgagccgtgattttgtaattcataatttgtaattatagaagtgatgcaacaagaagaacccaataaatatgtaaaggaactcactcaggaaaagtataagtatggtttcacgaccgacgtgcatacggacatcattgagcgtgggctgaatgaagatgttgtgcggcttatctctgagaagaagggagaaccggaatggttgctggagttccgcctgaaggcatatcgccactggctgacgttggagatgcctacatgggcacatctccgcattcccgaaatagattatcaggccatatcctactatgctgaccctacgaagaagaaggagggcccgaagagcatggatgaggtggaccctgagttgataaagactttcaataaactgggcattccgctggaagagcagatggcattgagcggtatggctgtggatgccgttatggactcggtgtctgtaaagactaccttcaaggagacgctgatggagaaaggaatcatcttctgctcattcagtgaggctgtacgcgagcatcccgatttagtacagaaatatctcggttcggtggtgccttatcgcgacaacttctttgcggcactgaactcggcggtgttctccgacggctcttttgtctatatcccgaagggggtacgttgtccgatggagttgtccacctatttccgcatcaatgcccgcaatacggggcagttcgaaagaaccttgattgtggcggatgatgattcgtacgtttcctatctggaagggtgtacggctccgatgcgtgacgagaaccagttgcacgcggccattgtggaaattgtggtgcacgaccgtgcagaagtgaaatacagcaccgtgcagaactggtatcccggtgatgccgagggccggggtggtgtctataactttgtgacgaagcgtggccattgtaaaggggtggacagtaaactgtcttggacacaagtggaaacaggctcagccattacctggaagtatccgtcttgcatcctttccggcgacaattcgacagcggagttctatagtgtggcagtaaccaataaccatcagcaggcagacacgggaacaaagatgattcatctgggcaagaatacccgtagcactattgtgagcaaaggtatctctgccggtaagagtgagaactcttaccgtggtctggtacgcgtggcacagaaagcggataatgcccgtaattacagccagtgcgactccttgctgcttggcgacaaatgcggtgcgcacactttcccttacatggacatccgaaacgaaacggccatcgtggagcatgaagccaccaccagtaagattagtgaggaccagatattctactgcaaccaacgcggtatctctacggaagatgccgtggggctgattgtgaatggttatgccaaggaagtgctgaacaagttgccgatggagtttgccgtagaagcgcagaaattgcttgccatttcgctggaaggaagcgtggggtgattaaattgtaaattgtaaatagtcaaatagtaaatataaagatgttagagataaaagacctacatgccagcatcaatggcaaagaaatattgaaaggcatcaacttgaccatacgtgatggagaagtacatgcactgatgggacagaacggtgccggtaaaagtacgttgagtaatgtgttggtaggccatccggcttacgaagtgacacgcggctccatcacctttaatggcaaggacttgcttgccatgagccctgaagaccgtgcgcatgaaggaattttcctttctttccagactccggtagagattccgggtgtttcgatggtaaacttcatgcgtgcggccgtgaatgagcaacgcaagtaccgccatctgccggctttgtcggccagtgagttcctgaagctgatgcgcgagaagcgtgccattgtggaactggacaataagctggccaaccgtagcgtgaacgaaggtttcagtggcggtgaaaagaagcgcaacgagatattccagatggctatgctggaaccgactttcgccattctggacgaaacggactccggtctggatgtagatgctctgcgcattgtggccgatggtttcaataaactcaagactgcggaaaccagtgctatggtcattacccactaccagcgcttgttggactatatcaaacccgatacggtacatgtattgctgggcggacgtatcgtaaagaccggtggaccggaattggcgaaggagattgagacacgtggcttcgattggataaagaaagaagcaagtgaattataaactcataatctgaaaacatgagtgtagagcaacaatatatagaccttttctcccaaacggaggcgatgatatgccggcatagtgccgaggtgctgaatgcgccgcgtgcagctgcttttgccgactttgagcgcttgggctttcctacccgtaaggaggagaaatataaatatacggatatcagtaagttctttgagccggattatggcttgaacttgaaccggttggaaatcccggtgaatccttatgaagtgttcaagtgcgatgttcccaatatgagcactgctctttattttgtggtgaacgatgctttctatggcagagctttgcccaaatcccatctgcctgagggggttatcttcggtagcctgaaggaagtggccgaacagaatcctgaattggtgaggaaatactacggtaagctggctgatacggcagaggatggtgtgacggcgttcaacactgcttttgtacaagacggcgttctgttttatgttcctaagaatgtggtggtagagaaacctattcagttggtgaatatcctgcgtggtgacgtcaattttatgataaatcgtcgtgtgctggttatcctggaggagggggcgcaagcccgcttgctagtatgtgaccatgcaatggacagtgtgaacttcctggcaacgcaggtaatagaaatttttgccggtgaaaatgctgttttcgatttttatgaactggaggagacccacaccagtacggtgcgtatcagcaatatgtatgtaaagcaggaagccaatagcaatgtactgctgaatggtatgaccctgcacaacggaactacgcggaatacaacccgtgtgacgctcgccggtgaacatgcggaactgaatctgtgcggtatggccattgcagacaagaaccaacatgtggacaatcatacgactatcgaccatgctgtgcccaactgtaccagcaatgagctttataagtatgtccttgacgagcaggctgtaggtgcctttgccggtcttgttttagtgcgccctgacgcacagcacaccagttcgcaacagaccaaccgcaatctttgtgctacccgcgatgcgcatatgtacacccaacctcagctggagatttatgcagatgacgtgaagtgcagtcatggtgctacggtggggcagctcgatgaaagcgctctcttctatatgcggcagcgtggtatcccggtgcgtgaggcgcgcctgctgctgatgttcgcttttgtcaacgaagtcatcgacaccatccgtttggatgctttgaaggaccgtctgcatctgctggtagagaagcgtttccggggagaactgaacaaatgccagggatgtgccatctgcaagtgatagcttataatttcgattcattatgaacaacgatataaataagagtagtatcttggctcccctccctacgggggaggggctgggggagaggcttcgagctgatttccccatcctttcccgtgaggtatatggcaagccgttggtctatctggacaacggcgcgactacgcagaaaccccgccaggtagtagatgccattacggacgaatactattcggtgaatgccaatgtgcatcgcggggtgcacttcctttcgcagcaggctacagagctgcacgaggcctcgcgtgagacggtgcgacgtttcatcaatgcccgtagtacgaatgagattgtctttacccgtggtacgacggagagtatcaatctgcttgtctccagctttggtgaggaatttatgcaggagggggatgaggtgattctttctgtgatggagcaccatagtaacattgttccctggcagctgcttgccgccaagcgtggaatagccatcaaagtgattccgatgaatgacaagggcgaactcttattggacgaatataggcagttgttctccgaacgtaccaggattgtcagtgtagcacatgtttccaatgtgctgggcacggtcaatcccgtcaaggagatgattgcttttgcccatgagcagggtgttccggtgcttgtggacggtgcccagtccattccccacatgccggtggatgtgcaggacttggatgccgacttcttcgttttctccgctcacaaggtgtatggtcctacgggagtaggcgtactttatggtaaagaggagtggctggataggatacctccctatcagggtggtggagagatgattcagcatgtctcttttgaaaagactaccttcaatgaattgccgttcaagtttgaagccggtacgccggattatatcggtactaccggacttgccaaagctttggactacgtttcgctggttgggatggacaagattgccgcctatgaacacgaattgacccagtatgccatgcaacggctgaaagagattcccggtatgcgtatcttcggcgaggcagaagacaagggtagtgtcatatcgtttctggtaggtgatatccatcattttgatatgggtacattgctcgaccgtcttggcattgccgtacgcacgggacatcattgtgcccaaccattgatgcagcgtcttggtatcgaaggaacggtgcgtgcatctttcggactttacaatacccgggaggagatagatgcgctggtggcaggtatagttcgtgtcagccggatgttctgacccaagcaaagctttgcaacctttcttccattccttgcgtctaatatatcaacaactaaaaaaaatgaattatgttagtaacaacaaccccgactattgagggtggacgtatcacccgctattatggcatcgtttccggtgagacgattatcggtgccaatgtattccgcgatttttttgccagcatccgtgacgtggtaggtgggagaagcggctcttatgaagaagtgctacgcgaagctaaggagacagctttgcgtgagatgcaggaaaatgcccgtgctatgggtgccaatgccgtgattggtgtagacctggattatgaaacggtaggaggtagtggcagcatgctgatggttacagcctgcggtacggctgtaacggtggaataataaaatacatcatctattttaatcgaacagatgatgtatttgacctgaacagatgatgtgtttcccaagaataaacgatacattttagggggatacatcatctatttttttatagatagaggtctttattatttatagaaatggaactagtgcataaaatagcctaattgtttgcatatttcgcttcaaatcaataattttaggctttcgttcaaccttttaatatgaataaatgctatggaccaaatcctattttggctggttccagccgcttccgttctggcactttactttgcctggtatttccattgtcagatgatgaaagaaagtgagggtacccctcagatgattaagattgccgctgctgtgcgcaaaggtgctatgtcttacctccgccaacaatacaagattgtgggctgggtatttctggggctggttatccttttctccattatggcatacggtttcggagtgcagaactcctgggtaccggttgctttccttaccggaggattcttttccggactttccggttttctgggtatgaagacggccacctacgcatcggctcgcactgccaatgcggcacgcacatcgctgaatgccggactacgcgtggctttccgtagcggtgcggtgatgggactggtagtggttggccttggcttgcttgatatatctttctggtatctgttgctgaatgctgtaattccggaagatgtaatgactcccacccataaactctgcatcattaccactaccatgctgactttcggcatgggcgcttccacgcaggcattgtttgcacgcgtaggtggcggtatctatacaaaagctgccgatgtaggtgccgaccttgtgggaaaggtggaagccggtatccccgaagacgacccgcgtaatcctgccacgattgcggataatgtaggcgacaatgtaggcgacgtggcaggtatgggggctgatttgtacgaaagttattgcggttctatccttgctacggctgccctcggtgctgcggcttttatccactcgggtgatacgctgatgcagtttaaggccgtaatcgctccgatgctgattgcagccgttggtatattgctttccattatcggtatcttctccgtgcgtaccaaagagaatgcgaagatgaaggacttgctgaactcactggctttcggtactaatctcagctctattctgatagtcattgccactttctttatcttatggttgctgaaactggacaattggctgtggatttcctgctccgtgatagtaggtttgatagtaggcattattattgggcgttctacggaatactatacttcccaatcctaccgtcctacccaaaagctgagtgaaagcggaaagactggtccggcaacagttataatttccggtataggcttgggaatgctatctacggctattccggtgattgccgtggtgatgggtattattgcttcttatctctttgcttcgggcttcgacttctctaatgtgggtctggggctctatggtattggcattgctgcggtaggtatgctttctacattgggcatcacgcttgctacagatgcttacggaccgatagccgacaacgcgggtggcaatgcggaaatgtccggtctgggtgaggaggtgcgtaagcgtaccgatgcgctcgactctttgggtaatactacagctgctacgggcaaaggctttgccatcggttccgccgctttgacgggattggctttgctggcctcttatgtcgaggaaatccgtattgggctgacccgcctcggggctaccgaattgtcgcttcctcatggcgatgccgtggctcttcaagatgccactttcttcgactttatgcatcactatgatgtgacgttgatgaatccaaaagttctttccggtatgttcctggggtcgatgatggcatttcttttctgtggattgacgatgaatgcggtaggtcgtgcggcggcccatatggtagacgaagtgcgccgccagtttcgcgaaattaagggaatccttacgggagagacggagcctgattatgagcgttgtgtggcaatctcgacgaaaggggcgcaacgcgagatggtggttccgtcactgatagctatcattactccgattgcgacgggacttattttcggtgttcccggtgtgctcggcctgctgattggcggattgagtagcggtttcgtgcttgctatcttcatggcaaatgccggtggtgcatgggataatgccaaaaaatatgtggaagaaggcaactttggcggcaaaggcagtgaagtccacaaagctacagtcgtgggtgacaccgtaggagacccgttcaaggacacatccggtccgagtttgaatatcctgatcaagctgatgagcatggtagccattgtgatggcagggcttacggttgcgtggagtctgttctaaaaagagtttttccccgtatcccaccaaaggcgggtggcgccattgtctgcgccacccagtttttccgtgagggtagcgtattgtgccgggtcggcagtggcggcatccgtcgagaacggaaggcggcggatcatgatatccgtatcaatcacttttccggtgttgctttggaccttgaaaagtttggggtatccggtacggcgttgctcggcccatgcctcataactttcgggccagcatgccagccacttctgggtaataatcttttcgagttttgtctctatgtctgcatcttcttcccattttggggagatggtaatcaaggctttcatgtccttgcccaccttgccgcctgagactacatctttataatcggcaggggttttattgctttccagatattcggaagcaccggcacagtcccactgtgtaaatgaagtacttacaccgtattcatagcatgtgcggggattttctttggtatagccgcggagggctgcttcggccctgagtagccagacttctgccgcactcatcaatacggctccggtcttttcgccgatggtgcttgtgttgagggaagagcaggaactgtaaatgttggcgtcaccgtctttcatgggtaagccgatgggaatgcctaacaattgctctctacaaccttcgagcagggcggtgttataccatttcttgccacgcgggtcctcataaccgttgacaatggattccatcgaggcattcatgtagacttcaccccaaccggcaacggcacacaaaggattgatatagttcttgcccattacagcgatggtttcccttgcaccttccagtacaccttgattgtcattcagtgctttggttgcttggtctttggcaagtgttgcatccacattggagatgcgcatggcaaggcgcaaacgcagtgagttggcaaacttcaaccagtccttcaaggtcttgccgttggtcagcatatcatactctttgaatttgttgttgtcacctccttcgtccaggtattcccttatcaattgctgcccttcgtccaggtctgcaaagaaacgtgtataggcttcctgcagtccgtaaacccggggtacctcacccaattggtggtagaccagcggaccatatgtatcggcaatgcggtgcatcagttctactttcaagatttcagtaatgccgagatagcctttcaggttgtcattgccataaaagttcttttctgtcttctgcacttccgtgtagacatatccgtaagtacattgccatgcagcattggtccagccggagttcaggttgtagcaggcgttggatttcatgaatttaggaatagggtccatgaagtagccggagaacatgtcgtggtttagggattgtgtcatctgccatacccagttcaagcctacagaacctatattgaagtagatacccgactgtatgggttcgaatggagcagtcaagttctggaagtctatttcctttttgtcatccgagaaacctcctttgatttcgttgtcattctcaaaaccaccggtacaagctgtaagcagcagcatgctatggcagaaaaggaatatgatgcacttgtttttcataaggtattcattttaaaaggtaaatcttaggttaaagccgatattccgggtagtaggcatgccaaacacgtctactccttgattgttgttgcctacggacatcactgcatcggggtcgaacggtgcttccttcttgaaaaagcacaagttgcgcgctgccaatgatacgtcgattccctttatgaatctgctattttccagtatcgttttcgggaaagaatagctcagtgatacttcacggagtctgatgcaggttgcgtcgtacatataatattcggagatggcatttctgccgcctactgcactgtagaatgctctcgggtcgttgaacttctgtccttggtattctacatatccccgggttcgggcctcttcggtgactttggtcacgccgttggcatccagttcggactgtgtcagtgacatgacttcgccgccgaagcggaaatctatcaggaaatagagctccaggtctttgtaggtaagtgtattgctccatcccatagtgaagtcaggattggcattcccaagcaaatccttgtttccggtatttcccaaaggccttttgctggtttcatcaaccatgatgctgccatcctcattacggcggaaagcatttccataaatatcccccaggctacctccttctttgacgcgcatctgatagccagcattgaaaccttcttcgtagtaggaaaattccggatagtcaggatgcagggtcactactttgtttttgttggcggacatgttgatgagactcttccacgaaaagtttctgtatagtagcggagtggcgtctaccgtcagctcaaagccttggttgcgtatttttccggcattgacataccggtatttgtaggtggagcccgtggggttgtccattctcaataactgattcttggtattggtctgataccaagtgaagtccatcccgaatcggtggtggaagaaacaccattctgtaccgaattcgatggagctgctgatttccggttttaggtcaccacgctgttctacggtatttacattgatactgccgcctaccatgatgatgtctaccggattggtgattcctatcggaaggtcattaccgacttccgcccacgaagcgcgcactttggcaaaacttatccattggggtagggagcaggctttgttaagaatccaggtagcccctatggagggatagaagaatccggtattcttgctgtctgtgtaggccagtgtggatgaccagtcgttacgtgcggtaatgtccaggtatagtaatcctttccagccccactgcatggtggcaaatactgattggagcgtgcgtttgctgtcgatgctctggtttacggctgctttggagtccatcactacattggggacggtaaatacattcggtttgtagagggaagcaagccttgagtctattgtcagggagttgactttactcatgttgatgctggcacccagtgccgtgttgagggagaagtcatcaaattccttgttgaacaaggccattacgtcaccgtagacttggatttcttggctgtccgaccagatgtaacgtccgttttccttgtcctcgtatttgccggcgatgttgggagctgtagtggcatacatcttattgtcgaatttatcactgatataatccacattaccccgtgcctgcaggctgaaataatccgtaatgtgcagattggcgctggccgatgcgatagcgcgatatcgcttgttgctactgagcacgcggtttttcaaccagtagggattctgtccccattcactgacggtaccatctccattcttttcaatccagttttgtgtcatcatattgcggtcggcattccacgtttcaaagttttctctgtaagtgctcatatctacgccacgtgggaaactgtacaagctgaccagcggattcagataatagccgccggtagcaggggagttcttgacggtttgggtcattagtgttgcaatgccgtccagtttcagcttgttgttgaagaggctggccgtttcgtgtaggttcaggttatttttctgtagcttgttgttgtctacaattcctttagccgtggtgttggcgtatgagaaataagtttgtactttttcatttccggtagtgatggccagcgaattgaaagtcgtgatgccattgctgaagaactcgcctatgttgtcatagtcggttacattgctttttgtaccccagcttgccgtaccgccatcttcgttgcgaccgtatgtattttggaattcgggggtactgatggcgtgactcacggtcaggttggaggagaatgtaacgcgctgcagtccggcttttccctttttagtggtgatcagaatgacaccattagctgcctgcgagccataaagtgcggcggcagaagaacctttcaggatgtttatgctttctatatcgtccggattcaggttggaaatcccatcaccggcatcacggttcaatccatcgttgttaccgccgattacggtggaggtggattctgttgagctgttcagcataggaacaccgtcaattacgtacaagggctggttgttgccgctggcaaatgcagagcgtgcaccgcggatggcgactttggcagaacctcctaaattggcggttttgttgatttgtactccggccgtctttcctgccagtgtattaatcatgttcggttctttggcacgggtcagctcactgctgcttatctgttgggtagaataggtcaatgaggacattttcttctggatacccatggcggttaccactacctgctccagggtgaggttcttttcttccatccggatgtggagattgtttctaccgttcagggcaatggtttgcggttcataactgatgtaggatacgacaatagtggcataaggagggatattcatgctaaattctccttcggtattggtgataacaccattggcggtccctttttcaagaatgttggcaccgataatcggttcacctctggagtccgtcacctttcctcttacagtagccatttcctgcagagtgtctgtcttatcctcagcactcctgctgtttttggttaaaacgatgtttttgccttccatcacatacttgatgtctgtccctttgaacatttggtcaagtactttggaaacagtttggttacttgcatggatgtcgacggtacggtgtacatcgacgttctgtttgttatatacaaataagtattctgtttgcgactcaatttgctcgagaacttgccctaccctcagccgggcattttgaatgctgaccctggcattctgagagtagcagttcccgttgtatacctgaaatataacaagcaggagaaggaataatgtgattttcataggtttgcaataattgcttaaaatctaatttttttagataaaaaagcctcatcaacaaaatttttctcatatctttgtcactgtgttaagttaataaattgattaaggtcgatttttgactgtttcggatcggaaagtatgggggtactttccgatcttttttcttactcatatataacaattgagtccttttcttcgttgatgcggaacttgaaaggatggtctttcgagatggtccgcagtatgtgttcgataccgtcctgctctctgaacttgccggtaaagctgctgtagttcagcagttggggactggcaacggttatttttacgttatagtatttctccagtctactgaggatgccgctgaatggggcgtcgtcaaaacagtatagtccctctttccagcgtagatattcataggaaggaaggacggtctttctgcattttccattttcattgagaaatacctcgtctttctgcaacctggtgattatctggctgctgttggccggatagatatcgacgacaccttctaccaatgtggttccgaactcatggctcccactataggcacaaacattgaaactcgttcctacaacttttaccttgttcgtttctgtatgtacatagaatgggatactcttgtttttggctacttcaaagtaggcctctccgtccagctccacattccgttcgttgcgtccgaagttggcggcatatttcatggtagacttggagttcagccatacgcgcgttccatcggcaagggtaatctgcgcccgttgtccggcaggcacggtgactgtttgcaattgtacctccttgttatatagaaagtcggaggtgatgaaataaccggctatggcgacaatggtgacggcggctatgcgggccgtccagcggagcatcggcatgatgcgcaccgttttcttttcattgttgtcctgtttgtccgagaacaaggaaatgtcatatatcatgcgctctttcaggaaggtgtcccggttttcatccgaggcgtctacccagtcgagtatcatcttttcttcttcaatggaagtaatacctttgaaatatttatataatagctcttggttcattgtcaataatttgtttcttttctaaaatgtgctctttttaccttttgtatatataaccggaaagtgggcggtaaccctattccgtagaggcatctttttaggatattaatataatgagtatagttataagataatctttcagtctcagccggagaattcgcagcactttggtgatgtgtgcctctacggtcttaagtgatatgttcaggctatcggcaatctgcttgtttgccaggttctggtatcggctcaacatgaatatcctccggctttgttcgggcatttcctgcaaggtcttatttacgatatgttgtatttccgtattgaatatcttgtctggttcgcaggctttcagggtggagatacgtaagtccaattcgcgcaggttgtggctactgatggtttcttccgcccgtagacgcacctgcttgtgctcgagtacgtgcagggctttgttctttatgatggtcagcagcagggcatgcaggttactattttcttcccagcggtctcgattttcccatagggcaatcatggattccatcacaacgtcttccgcttccgctttatccctgagataagaataagcaaaggccaaaaacttttcttggttttcctggaaaaagcgtgagaaaagattcatagtatgtaggctccttaaaccggacattaattgaggttctttatggaatataaggctttatatagcaaaaaaacataatctttttggaatatgcaagcattgtgccttgttttttcggagccattttggctgtatggacaaaaagaaagcctgatggagctccaccaggctttatatgcttaaagaataagagatttcttatttcttttccggtctttcttgtctttccggtcttggaagcaatactttacgtgacagcttgaattttccggtcttcgggtcgatgtcgagaagttttacgtcgatttcgtcaccttccttgataccggcttcttccactgtttccagacgtttccagtcgatttcggagatatggagcaaaccgtccttacccggcaggaattcaacgaatgcgccgtaaggcataatggagcgtaccttgcctttgtagacttcgcctacttcagggacagccacaatgcctttgatgatacgcatagcatcatcgatgctcttcttgttggtaccggcgatttcgattctaccgatgttgtccacttcttcaattgtgatggtggcaccggtttcttcctgcataccttggataatctttccaccaggaccgatgacagcaccgatgaattctttaggaatggtcattgtctcgatacgcggagcgtgaggtttcaggtcttcgcgaggctcggcgatgcactcggtaatttttcccaagatatattcgcggccttctttagcctgcagcaaagccttttcaaggatttcgtatgacagaccatccactttgatatccatctgagtggcggtgataccgtcttttgttccggtcactttgaagtccatgtcgcccaagtggtcctcatcaccgaggatgtcggacaatacggcatatttgtcttcgcctgcattcttaatcaatcccatggcgatacctgataccggtttcttaattttcacacctgcatccatcaatgccagagttccggcacatacggtagccatggaagaagaaccgtttgattcgaggatgtcggatactacgcgtactacgtacggatagtctgcgggaatctgccccttcaaggcacgccatgctaagtgcccatgaccgatttcacggcggcctacaccgcgttgtgccttagcttcgcctgtagagaacggagggaagttatagtgcagaaggaaacgttcttttccgtgttccaatacgtcgtcgataatcttctcgtccaacttggtacctaaagtcactgtagacaaagactgtgtctcgccacgtgtgaaaatagcggagccgtgaggaccgggcaggtagctggtctcacaccagataggacggatttcggtggtcttacgtccatcaaggcgcttgccttcgtccagaatggaacggcgcatcgcctctttttccacatcatgatagtaacggtcgatgagggctgccttttcttccaattcttcttcggagaactgtgccttgaattcttcgcggatggcatcgaaagcatccatgcgttcgtgcttgttcttgtttccggaagcggcgatggcataagccttgtcgtagcaagcgtcgtgaacggctttacgaagttcttcgtcgttcacttcgtggcaatattcgcgtttcacggtagagcctacttcctctgccagttccatctgtgccttacactgaatcttaatggcttcgtgtgcggccttcatagcttccagcaagtcctgctcggaaacttcgtccatttcgccttccaccatcatgatgttttcataagtggcgcccaccatcaaatccatatcggcttgctccagttgctcaaaggtagggttgatgacaaattgtccgttgatgcgtgctacgcgtacttcggaaataggtccgttgaaggggatatctgaaactgcaagtgcggcagaagcagcgagtccggccagagcatcgggcatatctacgccgtctgccgagaaaagaatgatgtttacgtatacctctgcatggaaattatcagggaataaggggcggagagcacggtcaacgaggcggcaagtgaggatttcgtagtcagaagcgcgtccttcacgttttgtgaaaccgccggggaaacgtccgaatgcggagaatttttctttgtactctacttgtaatggcatgaaatctgttccgggaactgcgtccttggcggcacaaacagtagctaaaagcatggtattgcccatacgaagcattacagaaccgtctgcctgttttgccagctttcccgtttcgagcgtgatggttctgccatcaggaagctcgatcgtcttaacaattgggttaatcataaaaaatgttttatatctaattttctttcaaaattcgtgcaaagatacataatttattcatgtaaaatggtgggaatgagataaaaagtttgtatttagttgttttttgctgttttctatatgtaagaacgtgggaaaatgctttgactgaacttgaaaagaagtatatttgcaggcacgtttgcaaaacaaaactgaagatacgatatgaagaaaatcttttttatggcacttgctgcaatagcattgggtgcatgtaattccgaacctaaattcaaagtagagggtgaagtgtctggtgccgacggcaagatgctttatttggaagcctcggcattggaaggtattgttcctttggattctgtaaaactgaaaggggatggttctttccacttcaagcaggtacgtccggtgtctccggaattctatcgtttgcgggtagatgacaaggttattaatttctcggtagattcgacggaaacggttttggtaagggcaccttataccgattttgccactgcctatacggtcgaaggttctccgaacagctcgaagataaaggacttgacgttgaagcagatgaagcttcaggacaatgtgaatgcattgctgcagtcggtgcaggcacataagataggcgctgatgtttttgaggatagtctcgcctctttattgaagaactataaggatgaagtgaaaatcagctatatttttgccgctcccaatacggctgccgcctatttcgccttgtttcagaagttgaataattatttgattttcgaccctctgaacaataaggaagacgttaagtgttttgcagccgtggcaaccagcctgaacaattattatccggatgcagaccgttccaagaacctctacaacattgtaataaagggaatgaagaatacccgtactccgcaacagaaggtggtggaaatccctgaagaggcaatttccgaaaccggcatcatcgacattaacctacgtgacatgaagggcaatacacgtaagttgagcgaattgaagggcaaggctgttattgtggacttcactgtttatcagagtgccgtttctgctacacataattatatgttgcgtgacttgtacgacaagtatgctgcccagggattggaaatttatcaggtttctctggatgcagacgagcactattggaaaacaactgccgacaatctaccttggatttgtgtgcgcgacggcaatggaatttattcgtctatagcggcttcttataatgtgaagaatgtgccttctgtgttcctggttaacaagaacaatgagttgagtgcccgtggagagagtgttaaagacttggaggcggcagtgaaagcattgctgtaacatgttataaataagaagttttcgtttaaatatgttacaaagcagccttttatgcttgacacgcattgcataaaaggctatctttgcaaaggaaaatcggaaagagggttccagcatgctgaccatgttggaattcttttttgtttatagtaccattaaaaactaacataacatttaaggaggaaaaagtatggcttatatgtcagaagacggctacaagaaattaatggccgaattgaaacacctggagacggtggaacgtcccaaaatatcggctgccattgccgaagcgcgtgacaaaggtgatttgtcggaaaatgcagagtatgacgctgccaaggaagctcaaggtatgcttgagatgaaaattaacaatttgaagctgaccattgccgacgccaagattattgatgagtcgaagttgaaaaccgattctgtacagattcttaataaagtagagcttaagaacgtgaagaatggcatgaagatggtttataccatcgtttccgaaagtgaagccaatctgaaggaaggaaagatttccgtgaatactccgattgcacaaggtctgcttggcaagaaagtaggtgacatcgcagaaatcaaagttccgcagggcatgattaacctggaagtagtgaacatatcattttaaaggaaggcaggtccgcatacgggcttgccttattttataatttatagctatggcaacaatattcagtagaattatcgcaggtgaaataccttgctacaaggtggcggaggatgacagattctttgcgttccttgacatcaatccgttggtaaaaggtcatacattggtcattcccaagcaggaagtagattatattttcgatttgaatgatgaggatttggcggcgatgcatgttttcgccaagagagtggcgcttgccattggcaaggccttcccgtgtagaaaggtaggagaagcggtattggggctggaagtgcctcatgcgcacatacatctgattcctatgcagaacgaaaaagatatgcttttttccaatcccaaactgaaactgacggacgaagaattcaaagctgtggcggaagccatccgtgcagcgctttaaccggtttattttcctcccctaaataaacggaagcgggagttggatgagttccaactcccgctatttttaccttcggcacctatcctttaattcttaatttaaatgtatttttctcccaattttatctgggcgtcattcacatatttgcggatggtatgttcttcatccttcttgcaaatcagtaatacattgtccgactcggctatgagataaccttccaaaccgtcgataactgcaagtttgttgtcgggcagcaccacgatattgtccttgctgttatagatgagtgatttacattttagagctacattgcctgcctcatctttaggagacaaatcatacaaagacccccaggttcctaaatcagaccaaccgaaatcgcctaatgatacatatacattgtcagccttttccatgatgccgaagtctatagatacattggggcaagccgggaagttctcatcaatgaattgtttctcctgggctgttccgtacacatctttgccaggggccagtttggatgtcagctcgggcagcagggcttcgtttgccttaatgatggtatttacgttccacatgaacagaccggagttccaatagaattctccgctttccacgaatacttttgccagttccagttcgggcttttcagtgaaggtttttaccttgtagaagttatcaccagcggtttcggctatttgtatataaccatatccagtttctggacggttgggcttgataccgagtgtcagcagattatcggattgggaaacgaagtccagtcctttttcgatagcggccagaaattcgccttccttcagaattaagtggtccgaaggagctaccactatattggcgtccggattcaaggcgcggatatgataggaagcccacgcgatgcagggagctgtattcctgcgtgtcggctccagtagaatctgttcgggtttaagttcgggaagctgttcttttacaaggtcggcatataagtcatttgttacgataagtatattttccatggggattacctgcttgaagcgatcgaaggtttgctgcagcaaggaacgtcccgtaccaaagaaatccagaaactgttttggaagtgtcttgcggctgaatggccagaaacggctgccgattcctccgcccataattacacagaaattatccttattggttaccatgctattgattttaaaagtttctgctaatgtactgcatattttacaaacaaggaatgattcaagtcggttttatcgtttttttcgcctttttttaggaaaagtattgcaggtttagaaaaaagctgtatctttgcaccgcatttgagaaatcaaacatgcccagatggcggaatcggtagacgcgctggtctcaaacaccagtggattcacttccatcccggttcgaccccgggtctgggtacaaagataaaagctaagtaattgataattcaatacttagccttttctttttatcggagatgttcccaaattgttcccaatcatccttatgtattccaccaaagatggggcatttacttcatgctatctattacttttagtatagaatcgggcttttctaccattcgcaatacagaatccgaatcaaatcccatatattctatataggttcgtattaactcataatgctctttggcatattttgtatctatcgcacgtgtagcgttgaaacagataggttcatgatgtgctattcggttacgaaattcacggatggcagtcaattgtttgtagatgtctgtttgttttaagccatgcgctttgttggggaatatttgaagaagtgtttttcctcctatgcgataattgcgtcttgtaaacagataagtccagaaaccaaatgtaaaggaagctaccatcttatcgttgttgtacactcccatattggtataagtacgctgtatgcgtactatttcggaagcttcctgttcaagcaatccattgggtcttgcttggttgattatccaattatcatcattgaagtattgtttgtagtgagcgtttatggcattgcgtagcattatctcaaacataccgataactccataaaaacgttggctcaacttgatgttgtattggtatagacgcaaggtcttggctttttcattgccacttgcttgtgcgtatttatttaatcttgcaggggatagtacctgcaaacattcgtcatatttcatttgatataagtttaaaaacgaattttctcttgcaaatatagaaattaatgcctatatttgcaagcgtaagaccctgttgtccctgctgaacaagcaaacttcagggttattgttcttttatgggtcatatagtactagtggaattttcatttccaatgaacaatctctattttgccacaatcttttcctactagcaaatatttaaaattaaaggaaataggtctttctatgttcccttatattaaagtaacgaaaagaagtatttgtttggttcttcatgttttaaaggtgttcatttatattgttgtgatagtcactgtaaatcgaaatttagaattaacatttgatatcgaagaatgtaatcgggtgtttctatagtgtgttagattgatatgtagataaaattagcaaattacaataatgatgtttggtatttatattatttacagtcggtttagtagggctgaaattctttaagatgtgaattttaaaatttgatcatcatgtacactttaaccgaaattggtaatcatgaaattgctaataacagtatgaatattcaattaacagatttgtattctaacttgccaaatgaattatctgacgcaattgcaaaatttaatgagaaagttagtgaagggtttatttcaaatccatttttgctggctgtgacagatgagtattttaaagcctcaaagaaaataatgctaatcgcacaagaaacattttgctggtttggagaaaggaatagaggtatttatacacttgaaaattcaatcgttgaattacagtaagtattcggccaactacaggtattaaacctttatatacaacaatagcgactgtcactatgaacctaatagtatcagccgctattgttttgttgaacccatatgttacaatttatatcagttacaagattcctccttttgccttgtcagtacacattccggatgtttcaacttccatttatgtggaagtagattcaaaagttcttcttgggttgcctttttgtgataaggcatttgtgcgataacatcgttcaggtataccctgggatttaccccgtgcgccttacatgtggccagcagagaacatatgacagacatattaaccgcagcttcgtgattaccacagaaaagaaaattttttctgctcagagtgatgggccgttggacattttccgccagattgttgtcccagtacaggcggccatcgtccagacatctcataatattatcccatttggtataggcatatgttatggccttgcctgtcaaagaacttggactgtatttaattccttctgtctccatccataccttcattgcctccatgattggcctggacagttcctgacgcgtctgtctgcgctcatcatatgacaggccggcttcgtcacactggcgttctattttatagacatgctgtatctgagtcagtgcatgttgcgccatctccctgttttcatccaaagcctgctcaaaatgacggcgtatatgcaccaggcagttgagtagccgcacgtcggggttggtcttgaaggctgtttcataacctgcaaaaccgtcacattgaagatatcccttgaagttatattgatttgccagggattcgatgaccgctccggcccgtgatcccccgtcgtaatggaagatgaccagtttctccatgactgatcttaccatccagagatattccttgtcggctctgtgtttttctctgttaatgaccggaactgtagtttcatccgcctgtacatagtcacaggagaagacttcccatttgagttcttcatacagaggcttaagcagttccacggttttcttgaaccagccgtccagtgtactttcggtaaggcctttcattccaagatggcggtattgctgtatctgacggtagaacgggacatgatattcatacttctgaagcagtatctcggtaagcaggctggtgtcagcaatgcacttgtcgaccggcatcagcggcatgggagctatctctacgcctttctgtccggctggaggaagcagggtactatccttgagagcatatttgggacggatgatcaccttgacgtaaagcattcccggcttgtgtttgacgacttttgttatctcttcgcctattctacggtataaagacaagtctacgcctttcggttctattgtatcggtttccaatacgggcaagtcctctatcattttgcggttctgacgatttcgttttacgtcttccaccgattccttctcaatcttttccacagcctcgtcccgcttttcttccgcctgctgccggagtccggaaaactcgtcggcaaagaggtctggcatattaggatcatatacgcgaagtttctctgatttacgaccaaagagctgacggttcagccatgcgacctgagccgtcaactccttgatacgttcctgcagattttttatctgttcggattgattcttattagtagtagacaatgaggctatagaggcattcagcccttctatcgtcttgagtaaaatttctttttcttccattgtctatacttcttttaatgatgtaaatatactaattaacagtgaattatgcaacaatatccaaagtttactcacgcaaaaaacatgttatacatggtattccttacgttcggctcttaaccgccggagcctctgttccgggttttcctgtattccttcaaccatcatcaccagatcgcgccactccatgggatagctgtttgatttgggatcatactccggcagcttgaagcgaccggcctccagacgttttacatacattaccatacctccgtcttcggcatgaaggagtttcattagtctgcggctggaaccgatgaagatgaagacatcaccgttcctcacttcactgttcattttctcatgtaccactccgcatagcgaactgatacccttgcgcatatctgtcctgccaggacacaggaagtagcgcatcgtgtcgttcaggttaaacatgaccgtctcgaagactttgggtaaatatttccttcagcaaatcttcagaaccgctcccgaagtgggcacgaagtccattgggaaacagcagcgcaacaccatgcggcaattgttcttcttgggaagactccgtaaatgcctgtttaaaactgataggagccaactcgtgtttgatactgctcctgtcaacggaacattttctacgccagtagtgataggttgaataacttacacctatctgttgaaggtacgacttcaacggcagctcgctttgttgcacctgcaattctaattcttcaaattcttgtctgttcataataattgaggtttgattgtattcactgccgcaaagctacaaccaaacctcaaagtgtaaaaggtgcatttcttcgaatgcttacgaattacaaaatttatacgatttatttgtaaataacccttcgaggaactatgcttctcctctttggctatatgtgaatagtatatactgcatagctcgtaatgtaaacgctggtgttatttttaacaatgtcgcaaaaataggattcaatgatagaacggggtatgattcaaaaattaacgtttactttgaccgaatatttcgagaagaaatgtctatttgcaaacctgatttgattatatttttgtctggcccaaattacgatagtttgataaaacaacgattaggtgtattctcacttaacagatgtattcctaatattgcggaaaggaaattggcaaaatttttttttgattcaagttcgcttaaaaatgtagaagtgtataggacttatcatccaacttttctgcaaagatcaaaaaataggtattcttggattatgccaatatacgaatttatcaatgatttgatataaaaggattctttctttggaaaacaggcttgatgagaaagtagaagttgcagaaccaacataatcgatacagttctctcatcaagtccatttcccaaagtttatgccatttaattcttattcgattgaaatacactcattgttactaaatatcaatgtcaaattatttagtgtataaacagactttggaatgccgaaatcactacctgctgaaattaatttggcattgggatatgaatgtctgaaaccggtcaaagtcatccctacatagatgtaatggtttccaatttttttactcaatcctaatttctccctcatcataccatttatatcattcatcgctgtccaagttctaggatcactggctgctttgacaaattgcacaagggcttcagcatcttctttttcccgctgtttggaacgatagattgctaaattccgtttgtctttagtgactatactttcatagtagttacttaagaaaaacttatgctcatcagctatggatttcaaaggatggtcaatttcaatcaactcattcatattgaatttggttccgtcatttgaaatcagatatactttataatcttcgcccacagacacccggtcaatcgtatgccaggtcaaagtatcttggtcttcaagatacacacgagcaacagtggatgctaaatttacctccttacctacatatttgtttttcaggtattcaacccatttaacaggaatgcaggtgttaaaattaaccctggatctgttttggcttaactcagcatcgtcgtagcccattgtcagagaacggaggtatttataagtctttgaatttatatcaaacaccttaagtccttttatcgactcattaaaagcgtcttctatcttctgactgttgggatatttgatttctgtagcgatattggttattatcctgttgtgaagtgtcagtggataatatccatagtatctgaccaaatcaatatcaaatggtaatgcctctgaaacaggtttattagtattctcaaatattaattctcctgatgattgtgatttttttgtggcttgtgctatttgcgcatcaatagcatcaaggcgcgatttaacagcgggattagttattttatcgctagaatgatatcctgccataaacataacttgttgttttagttgcttaagactatcaagggtattggcattgatattaacgacctcatgatctgctggcttggagtttaattgagtttgataatcttgcctatattgtcctaataaatcgatttctttagcttctttgatgtactttttccagtgttttactttgcttctgtcggattctatttttctaaggtaatctggcaggtcgtattcaggcattataggtttaatccctgttattttacttaattttcgcgtttcgtcagaataccatttacaggaatcttgaagcaaaaatttaaaatgtacctcttcttctgttagttcaattttggttacttctttcacaatggtattaaaaagaccttgagctgtaatggtgtttgcaataaacacactcaaaacaaagaaaataattctcataattgataaatcctcctttacttttccagtcccccaaaaaaggttttattttattaagacacgaagcgtggaactgtatgcaccacgtcttaaaatgcaggccctgagaaaacctttgtgaacagatgtgggaataacagccccacgcatatgcgtggagaccattatgacctttcttgttcactttttagaagtttctcaggcttcgcatttacaagaagaagggcataacgcctcaatatttttaatatgtataggaaagagtttcctccatccattcgcaaatatagcgatttttattgaaatccaatcaaataccatcggattacattttaaatcctctactttttcttggctcttctactgattgtcgcaaaccttgccttaatttctcccattgctctttgaaccattcgctgattggttgtcggtctatagtcagcaccaatttgttatcatcaaccgaacttttctccactttgaaaacatcattctttatttcaaatcttcgtctatgttcctcggaatagatttttccgctgcacctgattgcttcccttttgtataaaagagaatcaaccatccccttggtaaagccaatgacatagcatagtttttccattctcagcatttctttgagcaatgggaaccagcataatgctttttcaagaatggtgttcaatcgtgatatttccttgtctttggcttcaagctcttgattatgtattccttgtatgttacgaatttgtctgccatgctgttcctgcatttgttgcatctgcacttttaagtcatcaatgcttttgtcacgcttggaaatttcatagcgtaaactttcgttggcttgttccaaatcttttaatttaccacttccgaaaagagaacctacaccactggttatggcagtggctacatcggtagctgcacttttgagtttgtccgtgcgtatctctgcttttacttgtttgagttcttgctcggcaaggcttacctgttgctccttgtgtcgtttggtttcctctatacgttgcagttcggctttctgtttttttatgatgaaatcgtttcgctccaagtgctccttacccgtgacagcttttgcctgtccacgttccatcaggagaatatcggaagcaagggtctgcatggttgccatatcctcgtcattgagctttcggctctttccggtttcatggttcatccagtcgaaaacgacatgggcatgatagtttggtttgaaccatctgttcccgacttggaagctctctttgtcttccgttttcggctgaccgttcagccaatgcccttcgtctttgtgcaggaaaatttgtagtggagtgatgccccagcgtctttgacactcttcaccgaatttgcgtacatcagcaagtgtggtatccggtctgatgagcaatactccttcacggataggtgaacatcccgccaccttgataatttttccattctttcccttgcgttccctttccttttcctgcatggcacgtccggtcttttccttgaccatttgcttgatattgtcataatgagttcgcagttcgggggtgccgaagtcgggatttatccactgttcgttgttggtggaaagttcgggaacgacatagattctggactccccgatattacgcatatactcggcagtccttcggttgtgcgcctcgctcgatgcgatgttgcaaggcttgatatgtatgcttgattttgttgccatagcttcttttctttgtttgcaattgattattctgctcgctttcgcagaggggttcttaggggtaacccataagcggagattgcaaagagagggtcactctttgctcggggttctcaggggtgaaacgccctgagtgggttattagggcaaagccctaatcccctcgggagagcccacaactacgaaagcggagcgtgtagttatagtgggctataaccgaaagtcgtttttctttttcggtgactggctgctcacccctttgacggattggacttgcctttttctttcaacctgtttctgtaagtattcgttcaagtccttgcatccgctgtaagtctgtgaagcgtcacggatgtatcggtctctgccgtattccttgcggatttgttggagggcttccatgcctgcatggtcgttgtcgaaaaagcagtggatacgttcgtagctgcccaacggatagagagctttattcacattcgatacggaatttaatacgatatagtcctgtccgtccaactccggataatttgggcagctctcctgtctcaatgtcagaaaggagaggtagtccataaatccctcgaacacataacaggtattcctcgctttcccagactgtctgatgtgggagatttcctttggagcgatgcagcccttgaaatagcggttgcgaacctcaaacccacccgaagcattgggaaaggcgatggcaaagtaccgcttgccgttgtgggtgaaacgagcttcactacattctcttttcgccagttctatgttaattcctctaccttgcaagtaggcaagcagggcaggagatgacagcggaacaatctccaactgttggaagctcggctcagaagagctttgctttccaaaagagaaagataccgggcgcacgtgcggtgtctgctctgctatccgtttcaagatgtaaggtacatggtcggtagcgtacagatgtgcagccagtgcaatgatgtttccgccctttcccaaaccgaagtcataccattgttcacgttcggtattcactttgaacgatgcttcactctcttcccgaaacggagatttgtaccaaaggttgataccttgttgttttactggtgaataacccaagctgtgcaggtagtcggctattcgtatgcttttagcttcttctattgtcattttcttgcggatttgttggtgaatgaaaaaatgatgatttgatgaatttggaatttaacacactgttaaacagcgttatatcggctcatctttttctcatcagattgcttgccaaaagagaaatgatgttttcttttttcatcagcaatcgttgttgatgagtgtttgatgaatacatatctatctgtaaggcaatatattacttcccttattcatcatttcatcaaaataattagatagcggtcagttgttctttcgttaccgtataaaaccgaccagttttccttttcggctcatagtggcactcacgatggggtgcgaactcataagcggtgtaggatagcgaattgtgtgcggaagtaagtttccatacttcctgcacaactttcctcacttgatacttttcaaccttgacctgtgaatagagtagcaaggttacaaggtcgtttaggcagaatgatacgctttccacgttcatgttcgacatgatgtcaagcaacaactcggtcatttctatttccagtcggttgcggttgcttcggattattttctgcaaggctgcggtatgtgtcagtcttgggttgaaccacatacggctttcctgtgttgtggatagttccctttgggtcaggaaataaagaaatgcgggtatttccgcttttagcttttgcagaaagttggtatcatcactctgcaacggcattatcttccgcacccagtagcgtgtttctcctgcgtctatgagtatgggcagatattcgttgttggaacatagcacgaacttggcgaagaaagcaatctccgttcggtctttgcctttggcttccaccttgtaggtgaaagtggtgctcaggtttttcaaccgttcgctgtcttccctgcggttgagcaaaacttcgtccacaacgattagcagctttcctgcccagtcggaattgaactggctgcggaaatcttcgttggtgttgaaagtcacgttgttctcaaacacggctttcaggaagttcaagaacgtgcttttgcctgtgttgcgttcttctgaaacaagtaggacaataggcagcttctgtgtcggctgtagatacagcagttgcatatagtccatacccagctcgtattgttctccgaagatgtgccgcatcaaggattggatgtgggagaagtctccctgctgcggtttatgctctataggctcgtaaaggttcagaaatccctcaatctccttttggtagttcagatgattgggaacggtgcaaaagccgtcatacttggggacggtggcaagatagttctttccatagtcctgccgtaatgtgctgttgttccatacgacacgtttcttttcataaccgccattggcgcatggctgattgaccaccttgtacaaagttgttcctacgcgcatatattcttcctccttcataggcttagattaaagggttgtgttcacctaaaattctctgaatgtcggattggcggtatctgaccttgttgccaacctttacaggcttcagatagtttttcttagaccagtgccagagtgtggtatcacaaacaccgcacatctttttcacttcctctttggttagatacttctcctttcttgcttccgcaatggcggtagaaagttcatgcttcgcacggctgattaattggttggagaataatagcaaatcttctcctgttacttccaacttgatgttgccgtttccgttttggataattgccaatatgtctgtcataggcttcttgaaactgccggttgtaagactttccgtttcggcagtattataaacgaaaagccactaccccgattaggatagtggcgcaaatatataatgaaaatcaatcgtaaaacaatgatattcaattcgttaaattcgtaaaaacgaaaagcgaattaaacgagtttcaattggatagataggcttttaattcctcgatggcttcatggtcttcaccaatgtcttttaccagtttcttgctgtttccaaacggagaagtgagatttctgtatgctttctggatgcctctttcgtggacgatttcttgttccttgaactgctcgtacagtgcgtttctgaaagtcttgatgggacacttccgcatgaagcggtattccaccagtgcgataaacagtcgtgctatatctgtttccgtagcatgggttttcaatcgtgtgccaattctttcaatcagtatgtcatgcctttctatcagaagttctggcaacgtgcgtgtgtcggctttgcgtcctgcggtctttggctgttcttcctgcaacatatctgtttcttcctcgtccatgtcttcatcttcttctattgcccattccacgagagagttttcctcaatggctttctgttgcttcctgaatacttgccagtcctctttggttctcatgccattggcgatgctttttctgataatgaatttgaccatgccggaaacaagccatttgtataaggtgggaatatcctttcttttggtcagttcctcaccctgttccaccatgcactcatagcttcgtccgtaatagagccatgcaagcatggcaggaacaatgcttctcttgttcggggtatgaaactcatttactatcttctcggcaaggtctgattgtaaaagaacattttccagttcctcgaaatcagggtttctatcatcgcctattctcttgcgtgctgcttctttatatttcggaacaagccttacagccgtattgaaaatattgaagaatcctttgaacttcttgtcgttcatttcttctacgaaatcggcatattcatccggatggctgtcgagccattcctttatcagtcttttgaaattatcatattcttgttgtcccatacaagtatcagtctaatagttttacaaggtctttcttcatttcttcgtcaatatccctgtatcgtctgaaagccttgcttccctccttgtgtcccgacagtgcggaaacaaggttcgggtctttcacttttttatagatattgccgataaacgtacgtcttgccagatggctgcttgccacttcataaataggtcgtttgacttcgttgtgcgtcaacgggtctaagattgttacgatgcggtcaactccagccaacttgaatatcttttttatggcatcattgtacttttgctcggatatgaacggcaatagtttcccctcatattctttgtagcgttcaaggatttctttcgctttgtcgttaagtggaacacgtaccgtaaccggattcccctctttggttttcttgggaatatactctatggcttcattgaccacatttagtttggtcattcggtacaagtcgctcactctgcatcctatcagtgtctgaaatatgaatatatctctctgtattgccagttgtggggtagctgaaaggtcggcattgaaaattctatctctctcttcaagtgttatataataaggtgtaccgtatgtacattcttctatcgggaatttgtcgaaaggtctgtttgtggtacgcttgttatcgaagcaccacaggaagaatgtacgtattcttgaaaaacagtctatcagcgtgttcttgcttctgggttgtggtgtcctcttttcgggaatggcttcataaatgctcgggtaaagttcatagtactggtattcgttctgaaagaaatcccacatatcccgaagcgtgtcaggtgttaccaaatccacgtcaaggataaagcccttttgtcctctcttcgttgcccttacatatagttcataacgtgctaacgcacgttgtactactcgaaagttcttgatgcgaacttctgataatttatgcttgacaagaaattcagcaaacaaatccagcaaggtgggtttggtttccgctgcaatctcttcttctgttttatatctgtttggatgatgatatttgtctatgagtgtgcttagccattcgctgtcagcttccggtgtgtactcttgacttatcaggttgatgatgttctgtacttcgttgttcagtgccagtttcttttcttcatgaacaagggctactctgtctttataaccttgcttctcgctactccagtgatttgggttaattgtcagctcactggcagctttaatgtcctttttaccatctcttaatcggaaatagattgtagccacactattggtgtcgtttttacttgcggatttccggataaaggctgttgctttcataatcgggatttttagtaacggtacaaatatataaattgttcccaaattgttcccaatcatcccgaatttatttcaatccgattaaatagaattaactaagtgtgcgtttgtaatacattgaatattagtgtataatgctttatttttctttgattttctatttaataggattgttcctgatttatatatttcaaatgcgggtctgggtactgaagcggagaaagttgaaaaactctctccgtttttcttttctactcctcgtaactcgttggtttgctgatggggggcaagggtcaacgtaacaatctgagggattttatatttaagcctataatttagcaagtctatataagaaaaaagctctatctcttactcctctgaactgtgctctaaatgctttgattttagcattgaatgactctgttgcagcattggttgccctcctttcaaaaaaattgattatattcagataatgtgtttgtatagaacgtgcgacccttccaaaggtgaggaaccctgatttatctacctcatcataccaccttgccagccttgtcaaagcaatatccttaaacttacactgatgatagattaagcctaaccgcatagacagataatatcctttctttatatcgggatattccttgaaaagaatttcagctcgtattttttgagactgagtccataaggcttccttcttgtaaagcagataaatgcttctcgctaacaactgctttcttgtatctccattaacgaaaacaggtgcatgatacatctttccacaggcctttgcataagcaatctgagtggactcttcatccaaagcctcccagcgagcttttacacgcatctcctgcaccgctcataagctaacttctgtacgtgaaagcgatcggtaacacgtttggccgcaggaaagcagatgcgggcaatctgctccatgttaggagccatatccaaagtaatctcgcgcacttggtaacggcggcgacgggatagcttaagcaggacagaagtgaccgtatgaacgtccgtacctttaatgatagcaatcatactacctttaccaccgtgagcttctttattgatcagtacagtatagagttctccacgcgagagggctaccccatcaatacagatataagcaccgatattcttttcggatagtagccaatcctctgcatgaacaagttggtcccaatggagataaccacttagatggttacggtattgacgctccaataaatctccgtcaactccatataaaacacctaagagcttgcaactgatcggatagctatcaatatagttcttttaaaaaagacgcaaaatcttgcgtcatacgagtaccttcagccaccatacgccagttacgagagatatactcattatgcttctttaagagccagcgacgacgacgaatattaaggaagaccttcttgccacgaagagggaaatcctgaacaataacaggatcataaaagcctttactctcagtatcctgatctgtatacttctcaggaacgatatttttttcctcaaggtagatcacaacttcattcacgttttccttcacatcaacaagatcaaagtactctaaagtgccttcaggaagaagaaggcgataaccgtttaactccataagctatgaatttggagacaaagataataatttataaatttacccctcaggtttttacattgacccatcttatcgttgttgtacagtcccatattggtataagtgcgctgtatgcgtactatttcggaaacttcctgttcaagcaatccattggtgtatataataacttaactcaagtttcggatttagacttaggctgtcatagcgtaggctttaagagcagccaacctcttgtcgttttcaatgacctgcatattcaaatcttcagattcagccccagcctcagtgatttcagccacaaccgtcacgacttctaaatactcaaatagaactttgtttcgtatggtgtacatgtgagaaaatttttctaatggcttccatgtgaaagcctgccttaggaaggtctgtgtcatctgctatcagtactgtcggcaatttgcttttcttgtgatcgttccgcattgtcactttcattagaagccaattggttatgcggtatatcacctttcgccagttgatgtcgtcttgtgacaaataggaatacagtgcatccttttttcgaccaaacatccggcttaggacagaaccatcgtaatgtgagagcccttttattgcaaagaatggaagcaacactaatattgggaacacctggtggtttgtgagctgacagttgtcacgcttcattccaccaagactacgacagtccaagttgacattttcaagtaggtgtgtaaatgagtccataacggcactgcgacgtttctcactgaaaaaattgcggatttctgacggaatttttgtaattttgctcatggctttgagtaatgttttttatcacatctaatttgctcatttcccatgatatacggaaatactcaaagccttttttatgcgatataccaacctcaaagtctaaatcattaaataaataagacgattatggatttatatgcagacaatttggcggattacatctatcaagaaaatgatgtggacaagaaacgggcattgttattggaagtggaagcggaaatcaaaaagctcatgggcgaacaggaaaagggtagccttgatttaaggcacattggtgcagtacagatagaaaagatacaagatctgataggtacaagaagtttgcttctcaaccagatgtttcaagccacttcgcaggaaatcaaacgctttgaagcggtaaacgaattgctgaatagtttgaccaagaagatgtatcatcgcatggcaaacctctatcgtacattgattaatagccccaaagatgaatcttttgatgacgattatgtcatttgtggtacactgaggtatgtgttctgtggggtggagtctatattggaattgccggaagacagctattatggctccgattttgcttacatgatagaactaatttgttgttgtttacttgaagaatacaatgggggacttcccgaaatcgaagaatgttcttgtaattattcacccaaaaacacatcggatatgacagatgagcagttacaatgtgtggatgtatgggatgatggagtgacatgggcagaaggacatttacgccgtccggaactgaagcatattatcgtgtgtcatgccatacatgacatttgcactcacaaaccttactccattccggacttattgcggttaaatgatttttgggtagaagcccatctggtatgtcaacatattatagaccaaaacgggaaacgctataactcggattaatcatttgttttgcaaagtgcctgaaaggtggagacattgccaaactttgtgctccacttttcttcccatagtcctcctgtataatgcacatggccgaaaagatgatatttcggttggcgctctaaaattatttgtttcaatatctcgctacccgtatcttcatccaatatacctttcgggggaatgtgggtaatcaaaaaatccgttttataagacaatccacattcttctcccaaccattgcatttgctgaatcatcctacaggaaatagcgtagaaggtaatgccgtcatattctatgccgcaatcttcaagcaaagttatatttgcaggtatcaaccggcgggcttcttccggacaaaggtcatatgagaatctttctctttggatttcaatttcaggataatcttcacgagattttctgcgctttttgtagaacacgtttatttccaatacaaataatgcttctataattgatagttttagtaaaaaaatatcccgatgcaaatgaatgaaccgggagtttgacaaataaaatagattacaaaatcagtagggaggtgcccaatctttttcggataatccaatgtacttgggcaaaattgtcttgcttcaaaagtaaagtcaagcgtcttttacctatgcgtttatcgcacgctatcagtatgggtactaagtgccatcggtcttcaaatgaatgagtgagtaattcccaatcaggacaatcaatatattctctaattaagcaagaaatatcggatgtatctcccatccaaggataaaactgttctctcagttcttctttggtgaatatttggggatagtcccatatgattttttttcctatggtaatccaataacgtggcatgtcgtcgttagcatatccagtcttgctacgcattgggtatgttatgcaatgtatctgaaatcctacatttgggtcaattatgcggtatagagctgtttggagtttgctccagggacggtatcgtattctcattttcttgttgttttgatataaaaaacggtttaatctgtttcaatcgtacaattatttcttttttgaaacgcgattcggagtactcatcttctgtccagataagccacgaaaagtagtcccacgaattgttaggattgagcgtaaatccttctatatccagttggcttacatcgcgtccatatatatacgtacaaacagcatatatattattgcggaaatagaacccagatcctacgatgtacccgttctttcgggcttcaatggtgtatttgcggctgtaatcccaattgggttcactgaactcaaactgaggaagctctgattttatgtcaagcaggcaatgtttcatgctttcccagtccagtttctctaagtcttcagggggaaaccgcttcagggctttttctctacaggagctctttattgcagatggtatatagaccaaaaaggcaatgcccatgattattataactaaaagcatcggtaaataagggattaatataaacttccacggcatgacaatcagattgttatagcgtagaaacattaagggaaatgtaagaaaatacggcaaggaagatatataactttcaccatcaaatatttcatctacagaagtatctcttgaagttaatacattacgtataaatataaaaagactggtaattataaaatatgcaggtattgcacaccatatagggataaatacctcccaccattccctttgtattgcaccatccagtttttgagttaccagaaaagcgcttaaacatcctgcgctggctacaataaatttataagatcttttcatgctattcttttaatatcatgtttatattttcaataatatctttgcttatgctttctatcgtttccttcatcctacttaaatgtcgttggctatctccgtcattcagatttcggaaattgatagtcggatgggtatattcccataaaagccaagaatcactcgaatgatatctgttgtcattatgaaaatcttctataatcttattaatttcatttataactttctgtatttctttgttttgtatttctttggcgattgagagtctgactgttttcccctctttatctctcagtataacaccgctatatgtacgccagtcaacttgaacggcatacatcaattggtaatcatcaccgattgtctttagcttaaattcaagagactggtatttattgttactttcataatatctgcgtatgtagtcttcatgattgtcgagagcatatttgtagtcactaaaagattctttaattacttcataacctttttcttcaatgaccgcttccagttgactccaaaaatcgatttgcagactaatttctacttctcgtatggcatccttgtattgagatatacaactgatatacttcgggttacttttaatcaaattgattaattcattcttttctttatccatttggtgtgtcaatattttgattaagttcaaatagtgtgctattccttcccgtatcagagacttgtctattgctttgtggcgacaatcagtcagccagtttaatataaaatcggcataggatatggtaaagaaagttatttcttcgccacctgtggttttatcaatatcgtgtacttcaccgtctaaagacaagtatagcaacagtgtatcattcttattttttgaacatcgtttcagaaaattatgataccgaagaagttgattctcttggtcagtcgcataaatcttgttttcaatgacaatatggtttatcccgtccgtgaggtaaatgtcgagtcttcctccatctgtatctgttttaggaccgatatatttttcacattccactttggcattatcgcaagtgaaagaaacaatatggtctgtttgcccattcagacgctcaatgaataatttgagaaacacatctttcatttggtgctgtccattcggattcagcaaatccgctatcatggctgaatgtactcttgtttcgtcactggtcatattgattactttgaaaagattataattgtctcctttctctttccgtatatattcatgtttttcaatgattagatgtatttcattgaatagttgtatcaatttcttcattttctcctgtagttttatacttataaaattcagatgtttgtcttttgtacattcttaattggctgataagaggataacttattcttgcttctctgaaaaatcagcaaatgcaattacatctccctcgatgtctataattgattgtgtataattctcacataagcaataagagtctatttttaatatcatgcagatgtctttcatgatagaagtaacttctaagtgttttctatttttgaaagttatatatattccatgaaaccattttcttcctgtaagtgtggcgtaaaatttccattcaaccttttgagaaaaaagataatccagtaatttatcaagatcctttttgtctgaaggcatttctacacaatatccatttccaaaatccaaaaagaaatagttgatgttaaagcagttcaaaatcatattgtggctcatagcttttaatgaatatgtggttgataaatgttttgtttacctctttaatttatttcaggagtttgtcggatatgaataatacatggttaaaatgtttgtgtttgttttatttttatgttttaacataattaacattgaaatacaaataggagtcctcaatgaaagattaaaaatttactcctaatataaacctcttgatttcttcctcgctcggcaattctatcatatatttctgtacgaagatattcgggtctaatccggcagtggcatattttactaatgtatctcccttttccgtacaaagcagaataccgataggtggattgtcgtccggctgcattatctctgccttgaaataattaaggtacatattcagctgtgaagcgtattcatggcagaacttgtctatctttaattccacaatgacatggcatttcaagatgcgatgatagaatacaaggtcggcaaagaagtaatcttcatcaatcaagatacgtttttgtcgggcttcaaagcagaatccatgccccatttccagcaggaagtgttgtaagttatcaagaatagattgctccagatcgttttctgttactaaggcacgttcattcaattctaagaactctaaggtaacaggggtgttgataacatctttaggctgtaataaggtcgcttgttgctgtactaaagcggagagggcttctttatttttggatagtccgctacgctcatagtataaagacgctatttgttgttccaattctttgacagaccagcagctacgaattgtttccatttcatagaaagcacgttttaccgggttgtctatttttgcgatatgttttaagtgggtataaggtattttattgaatatctttgttgctggatttatccatttattatactctttatcagattgttgtaattcggcacttgccgagtgccgaatttcatttcctgccatgatgtagtgtaatacttgttctttcagatgtggataaacaaggtataaccgtctaaattcacggaatctacgttcattcagaccttttgttttcagccgttgttcctgctttttcaacagttgttcaccgtatgtggcacggtcttctccgttctgttcgaattccacgatatagcaacccataaaccagttacgggaagtaagggcaaggtttacagcgtgtgcggcttgtgcctgcaacgtgttctgtatcgtgctgatatgttttactaatgcttcaaagttcatagtcgcaaagataatcttttgtggttaaaactttagttcaggcaagctgtttattgcttcctctttcaatttatccaccacacgggtgtatttctctgtatgcttcaatccgctgtgtcctaaaagattggctaagatcttgatatttgccccattgttcagaatgttcacggcaaaagaatgccggaagcaatgccagcttatatgcttgtctattccggctctttttacccaacgcttaaccgatttgcagcagctttcgtatgtaggcaaatcgaatatcaaacagttcttatctgccggagcttcaccaatgatagacaatagaacgtcattcaaagaaataaccacacctactggcagaatgtcccttggccttgctttgctcgaacttcaataatcagttagcataatccacatttttaaaagtaaggtcttttacatcgcagaagcgcagaccgcaatacaggcaaaagataaacgctcgtctggctgtagggttttcgttgttataatgaaaagccaccaacttttgtatttcttcgggcgaaagcacatctttccgaagcatctgactatccactttgcaggtaacatctttgcaagggtcttccagcattacatcatgctctattgcatagcgaataactttcttgaaacgctggtaaatgcttttagcaccttcaccaatgcttcgggattgcagataagctacaaactgttccatcatttctttggtgatgagttccggtttaatgctacactcattcatggggtatttctctttcaagaagtctttgaaacggctaagtgcaatttgcaccatgcgaatgtctttctttgtataactgtttatgtatgcttgataataatccaagaaattaaccgtcctgtctttctttaagcggtagccaagcatactctccttaaactcctgctcacgctctgcgcgtatttttgaagcgagttccaaagtttccttgttctgttgtcattcagctggagtatgtggcttgtctatcagatacaggctaaggttttcttttcgcctgtgatgcttgactgcgaactttggctttccttgcatcttgccactttcgtaatatacctgattgccgttttcatctaatacgggcttttcctctctacctaaataatactccaactaaaggctgattctgccatccgaaagtttattttgctccaatttcggattttctttcgttttcctatgatttctatggtttgtacctggtctgggcatgaaaggatgtagacaaatctattataaatcaaaattttacaagggttttgtctttttctactgaaacatagctgaaacatttttgttttgggtttcaatcccagtagatgggaccaacgtaaaaagaggcggatgaaaaaaatgagggaaaggaaccgggagaggggtatccgcaatattggaaggcattcttgataatcttctcattacaacaaaagtgaagaatgtaaataatgagatgcgctatacttttgggaataaaaaggcagaggaactctttgaatattcggccaaagaggctatagactagacggattttgaaacaatgccagaggctgtagctttaattaggaaagaggatgaagagtagctggtcaaggcggggattccgcaagagggtatacgacgtttttttaccaagaagagcaaggagtggttttccttccagaacaataattttgatggtcgcaagtggattgtttatactgcttaggacattactgatttgaaaatcatggagtgcaagctgcgtctggccgaagaggaggctgaggaatccaaccagataaaatcgactttcctagccaatataagtcatgagatccgtactccgtttaatgcaatagtcggttttttgagtattctggccacggaagtgtccgaggaagaacgggtggagtatctcaatattatagaacggaataatgaactgctgttgcagctcatcaatgacattctggatttgtcgaagatagaagccagcacattggaatatgtctatgccaatgtggatatcaataaaatggtgttcgagatagagcaggctacaagtattaggctgaccaataaagacgtgcgtatggccacggttacgctattgcccggtttgctgctgtataccaacctgcgcagaattatgtaggtatttaatgacttcatcagcaatgcgttgaagtttactgctgccggtagcattactgttgcttacgggatgcccgaaaatgggtatatccttttttatgttaccgataccgggacggggatatcatcttataatgcgcaggggatttttaatcgctttgtaaactggcttcctttaagcagggtatcggactgggagtggccatttcgcaaaacattgcgagggaactgaaagaggagatagggggacgcagttaggcacgggctccactttctggttcacgttgcctttttataagatggacgcacaccgttctatctttccttgatgcggtaagctcaatccaatgaagggacatcgattgtctggctttcctcgttccagttgtcaatggtgaattctccggatgattcttcggaaaagatgtctcccagagtaagggtcagagtcagtttggagtttgctttcaaaggttcgttcaatgtttgtttgaaactttttacgtttccgtttttcagtatgatgctcatctggaattctgatttcccgaaagaagggaaaagcatgacggtggcattgctcatttgcgtaccgtcgatggaacggactagagggaaggctactgtgcgcgggcttccctgaggaacggcggtgtagaaatttagttctccggcaatattagtgatacgcaccaccatgctgtcgatgctcgaactgaggatgccgttattcttgtccttgatgattaccttcagtccggtcactacccgtttaagggatgctttcaggttttcacttccgatgttggcaggttggacggtatgtaccaagtcgaataccggataataggttgtgtccgcttccattttgaataaggaaaagtgttgctgggacatgtcttcgcctaagatgtaggccgggtccctcataagaggatgtgcataaatcggctcctcgtatttaggggttccccagtaaatcatgttatagggacctgcgggtaaggataattcccgattgacgccatcgttatagaaagttccgtctttaacttggtagtaaccgtaaaaaggtgtcagctttcggtttacatagttcccataataaatagaggtgcccgccttacagggcatgatggtcagtatgccggtcagcgggctttgtccgctttctgtggacacgtccatcaagagtcgtggtgataccaactcactgcttttttctatctggggcggattgtcattggtgcagcttgccacgattgcggcaagtactgcaaatactactaattttttcattatctgttaagttttaggttgtactttcctgagaacgtttttagaaagaaatggttctttgtattccggagaaagtatattggggatggaaaagtgagatgaaatcaattccagcattgagggggatgggaagaatctcccccctctttaaaaggtttagagaagggatggaaaacaaattataccttttttagtaacattttagaagccttgattaacgaaatcatatacttttcgtaacaatttctcgacactctttccttgttcctccatacttttgtatccaggttctttgcattgacaaagagcgttataaaatctttgatattaactattaaacaatgtacaatgagaaaaacattcttggaaaagtgcataaatttgcatttgtgccgcattgcatgggtactgttgctattggtacctgcaatcagtagccttcaggctaatccttctcaaaacaaggccgttacaggagttgtgacatcggctacggacaatgaaccgttgatcggtgtcagtgtgcaggtgaaagaaactgctacaggtggtattaccgatattgacggtaaattctctgtgaatgcagaacaagggcagacgctgattttttcgtatatcggttatcaaacccaggaaattcagattggtgcttcatccgttatcaacgtggttctgaaagaagatacggaaatgctagatgaagtagtagtagtaggttacggtgtccaaaagaagaaactggtaactggtgctacggttcaggtaaaaggtgataacatcgccaaactaaatacaaacaacccgttgcaggctatgcagggacaaactccgggtgtgaatatcacttcaacttcaggacaaccaggtgctgatatgaaggtgaccattcgtggtttgggaactgtaggtaattcttctcctctttatttgattgatggtgtaggtggcgatatctccacgctaaatcctgccgatatcgagagtattgacattctgaaagatgctgcctctgcagctatttatggtgcgcaggcggccaatggtgtagtgttgattactacaaaatcgggtaaggaaggtaaggctgtagtttcattggatgcttattatggtattcagaatgtggcacgtaaagcaaatatgctgaatgcggaacagtatatggccatcatggatgaacaagcattgaatagtggcaatgccgcttatgattggaacagcttcaagtcaattcgcgatgctaatggtaacatatatgacacggattggattgatgctatgctcaaggatgatgccaagacgcaaagttatacattaggtgtgacagggggaactgccacttctacgtatgcactttctttaggttatatgcagcaagaaggtattgttggtggtgctgacgtatccaattacgaacgttataacttccgtatcaactccgaccaccaggtcatcaaaaaccttttgaaggtgggtgaacaagtgagtttcgtatataagaaaaataatggtacaaatgtaggtgacttgtataacaatacgttgcgcagcgcatttgccacttccccgctgagtcctatatatagtgataataatctgtatgatagtccttacaatgacactagtagtagcgattggcacaattctgatggtaacccttatggttccatgatgaccaacactaataatgagaacaaggctgccactttcgccggtaatgtatatgcggagttgactccgattaagaatttgaagatacgtactgtattcggtgctacttatggttccagtgagtatcgcagttatactcccctttatcagtttgacatctatactaagaatacggagaatacaaaagtaaaccagaacatgactcatggtttgacgatggtttggacaaatactgcacagtatgattggaccttgggtgaacattccttcaatgccttgattggtatggaatccagccgctatgaaggcacttatgtaggggcgagaaatggtatcctgaaagaaggatttgatgattgggaccacgcttttgtcagcaacgggtcagccactactcccgagcagggattgggtgcagatggtaaaccgaatgatgaaacacgtaccgtttcctactttgcccgtttgggatggaattggaaagagacttatatgattaatgctactgtgcgtgccgatggttcttccaaatttgccagtggtcaccgctttggctacttcccttctgtatcggcaggttggacactgacgaacgaggcatttatggaaagtacccgcgagtggctcgacttcctgaaactccgtgtcagctggggacaagtaggtaatcagaatattgataactaccaatatacagctcctatcaagagctctactaccaattacttgtttggtacgggccttggctctgccaatcatgtctggggtgcttatcctagccgtctagccaacgagaatgtgaaatgggaaacttccgagcaatataatatcggtatcgatgcccgtttcctcaatggatgcttgggtatgaatgcagatttttatataaagacaaccaaagattggctggtacaggctcctatccttgccactgccggtacaggtgctccttacatcaacggtggtgatgtaaagaataccggtattgaactggcgctgacttggaatgatgaaataggtaaggatttccactacaacattggtgtcaatggtacttacaataaaaataaggtaggaaatattcctactgaagatggcattattcatggtaatacaaaccagctgtatgacaactctcctgagttctatcgcgcttccaacggccatgccatcggttacttttgggggtataaaactgccggtatcttccagaaccagcaagagattgacgactggattgctgccaagaacggtgtgttgcaaagtgatgtgaagccgggtgatgtgaagtttgtagatgtagaccataacggaattatcgatgacaacgacaaggtggacttaggtaatggtatgccggactttacttatggtttcaatttgggcttcgactataaaggttttgacttctcgctgaatgctaatggttctgtaggtaataagattgtgcagagctatcgtaaccacactaataagaaatcaaattatacaactgctatcctcaaccgttggaccggagaaggtacaagtaaccgtataccgcgtgtgactgatactaacgtcaactggcaattctctgacctttatattcaggatggtgacttcctgcgtattagtgccattacgctgggttatgatttctcccgtctttggaagggcaaagctatttcgcagtgtcgtgcctatatacaagtacagaatgcacttactttcaccaaatatgatggtatggatcctgaaataggttttggtccggaagacagcaataaaaagagttgggtatcgggtattgactacggttactatcctcgtccgcgtactgtgcttttcggcgttaatcttaagttttaatagaaaagagttcttatgactcataaacccaaaaacaagaaagaaatgatgaaattcaaattaaatatactggctttggcattgttcggctttgggctggcatcctgcacaaacagcttcttggatgtggaatcgaagacggaatcttccaccggaaactattacaagacagaaagtgacgcttatcgcgctttggtaggctgttatgacggatggcaatgtactacatctaataagggagtaggtttttatctggcttcagagatgatgtcggatgagtgttttggtgctaccggtgttgctgatggacgtaattatcaagtaatcgatcgttttgatcaggcacagtctacatctgatttgaacatatacgaaacagattggaaaaattattatgccgctgtttatcgttgtaacgagttgatttcccgtgcagatgacattaactggacgagtgaagcaacaagaggcacttatataggagaggcacgtgctatccgtgcactttgttattttgatatggttcgtctatgggaaaatatccctttgttggatattcctactactgataatatttcgcaagcaaatccggatgacgtttaccagctcattatcagtgatttgaaatatgctgccgagaatattccggccaatgcctatccgaaagcacaagctgcatctaacgacggacatattacgaagtatgctgctgaggctcttctggcacgtgtttatctgttctattccggttattatggtaaagaacctgctgggcttactagagctgaagctttagcaggagtggaagatgtgattgcttccggggaatttggtttgatagatgagttcaagaatctttggcctgctacttccgtgacttggacaactaataatgatggtagccataccaagacaaatacgtatgcagggcgtggcaatgtagagacagtactggctcaaaaattcaactatacatcagactataatggtaatgctgatggtaatgcttggcaggtgatgattgcactccgtaatttgattgcggtgccttatggacaaggctggggaggctgtacagtcaatccgaaattggtgaatagttttcaatctggtgacactcgcagtacggcgtccattattgactgcgaggctgagggccttgtagatcacgataatttctcgttgctctataatgaccaacgtgagtatacgggttatgctatcaaaaagtattcgccacttgctatttggcaacaagctgaagatggtacttggagtgaaataaatgaagtaatgggaaaggacataggtgcaggcgagtatcaacttagtccatatcaggatttcattgtagttcgttattcggatgtattactgatggctgcagagctcggtagtcctaatgcccagagttatttggatgcagtgcgtgatcgcgcttttggtggtgataccagcaagcgcgtgacagcaacaaaggagaacatcctgaaagaacgcatgtacgagtttgcttttgaaggattgcgttactgggatctgcttcgtcagggtgtggaagttgctgcttccgaaattgccgaaactcgtactgtgctcagtggtggcgtggaagacgtagtgactatacagagtagtaaggttgtatcaacaagaggtttgtgccaaataccttataaccagataaacctttcaaacggtgtgctgaaacagaatgccggttggtaaatggatgtataacaaataaaaaaatctaaggtatgaaattaaactattatatctattcgcttatagcaagtgtgatgctaatattcagcgcttgttcccccgatgaatatgatctgggtgacaaaggagtgacatctgatgatcttgtggagggtattgcctatacgattactcatgactcgaagaatccgaacattgtttatttggaaagtaagttaggtgccaattacactgctttgtgggagcatccccaaggacgcagccaagaacagaaagtgacactaaagatgccttttgaaggtacttatactgtgaaatttggtgtagagacacggggtggtgttatttacggtgaacctacaacttttgatatcagtactttttgtgcggactttgtaaacgatgaattgtggtcattccttaccggaggtgtagacagtgagaaagtttggatatttgacgatggttcctatggctatgcggcaggtgagatgacttatgctgacccttcaaaaactactgaatggaataattgggaagctaactgggatccgggcaagggacatactggtgatgatgctatttgggcaagtacaatgacctttgacttgaaaggtggagctaatgtaaatgtacattccgagtcggtttcaggtactacggacagtaaaggaacctttatgctgaacacagagaaccataccatcactttcacagattgtgatttactacacactcctggctggactgatagaagtacaaactggagaaaagacctgaagatactggaactggatgaaaaccatctgcgtgtggctgtcatgcgtgataatagtgagggtgcttggtggttgatatggaactttgtctctaaagagtttgctgacaactatgtacccgaggatcagcctgatccggagcccacattgcccgacggatggaaagatgctgtatctcaaacagtaagtaccactattcagtggaatatgtctgctgatgttccttttgactgggcaaatctggatggtagtttgatgaataactttacagcaggcaattatcctgactgggcaactccagtagcagaccttgataaactctctctaactatggattcaaaggctatgacctatgaattctccatgcccgacggaacaactgtaagtggtacatatacactggatgaaaaaggtatttattcttttgagagcggtgtgccttcttatcatatcggtggtggagacatcatgttctttgccaattctgataaccagctccgtattcttcgcctggagactatggcaggaaatgtgacaagtatgtggttgggagtacgtaatggtgataaggaggaatatgttgcctatcattttattcccaatgcagcaggaggctcttctactcccgaacccaaagcggtggtagtagataacagtaagctggtgttcggacatctcgaaggagagaagaataacttccgtattgaaatctacaatgattttggtagtactaaaaatgatagtccggtagacctttctgctctgacgtttgattattctatgaagctgactttcagtatcagcggattgagtggagatgcactgacaaaagagtataatgcagggttgatgtacactgctcctggatggtggccttcttacagtggtgagtccgatgttaaaattaaaggagacggtacttatactattacttataagccggaagcagccattaatggtgcaatcgtatttgtgattgatatctttgatatcttcagtgatattaccgaaccggatgctgtaaaggtaacaatagataacttggagattttgtaatctcctatggtggacgatgctttcgtggcgtctgttgtaataggtataaaaggaaaggctacccgtgaagggtagcctttccttttaaatggaggattattgatcagttcaatttctgaagaacgggtatatgcttatttctcgtagtcgaaatattcaaaatctgcgtacgcctctgatccagtcgagccggaagctgcatataggcccagcgtgatttccgtaaagccacctggggtttcggtactgatatagcaggcattcatgcgtcccatctccttgaaattctttccgtccgtagcatattcaaaggaatatatgtctttgtcgccttttacacggagttgcactttaccttgaggcaaaatcacctccttttctatatgggtcattgctccgagacggtagcgtaatactacagcttgtttcccgtcttcctgctgtttgacgaaaaggtcatagtgtgcaggtttaaacatatagaccgtcaatccggtttcatctcctgcagaggctttctgtagccgcatggaagtagtagcggtaaaatcgatatgttcttgtcggcggccgacgaagatggggctttccttgctgttatccaaattgacgggagtcgctttcagccgtaacttgccggatgagaaagtgtagtgttccggatgtgcacccattcggctcctaatttaccatctttgaattctgtgcgggtaggtttttctgcaaacgtttgttgcggcagggtgggaacatacatttgcagggcaatggtcccgtctccattcactacaggccaggcgttggtggcccagcgcacgggagcgaggaaggtttcgcgtcctaatagatggtgggaacccgtttgcgggcggaatgccaagtagaccatccaccagcttccgtcgggagcctgaacaaggtcagcatgcccggtgccttgaatggggctgttctaggcgtttttgttaatgtgtgtcagaatcgggttggtggggggctttcgtatgggccgtctatcgtgcggctgcgggcaatcgtcaccttatgtccatattccgtaccgccttcagaaatcagcagatagtaccagccgtctttcttatagatatgcggaccctccggatggcgtcctcccgtaccgttccagatgtgcttggatttactgagctgttcgccggtcatcgggttgatttcgcatagaaagatacctatgtcggggttgctgaccagataacatttaccgtcttcgaaatagagggaggggtcaatgccaccttgtttcagccagataggatcagaccattcaccaagcggggcggtggtatggacgatgaagttgcctttgtccgatacattggtggtaatcatgtagaatgttccgttgttgtagcggatggttggcgcatagatacctccctactgttgaccaagtagaagtcatcgcctacgcggcaaacgcttgagtcgggatggtagcccggaataaccggattttgatatccctgcttgtcttgtgaattccaggatggacaaacaggctacgcctgatgtcagctattgattactttctgaccctattcggtaacaaatcatactgtttggcataacatgctgtttggctatttctcactttttccgctacttttgctattacttttaaccattatttaatacctaaaaacaacatgaagaatattattaaaagattccagattagcttggtgctattggcacttttcctctcttcttttgtgagtgcgtgctccagtgatgacgaaacagtgactccggaaattactattcctgaaaaaattctgatgaatggaatgactttctccaaggtcggaggaacaagtacattgaacatcaaatcgaatgttgcgctggaagtaaccagcagtgcgccggattggtgtaaagtcactgccgagaactccacatcgagcactatccttaaatatgcggttacaactgaagccaatacggaaccaagtgaccgggaagcaaatgtgatggtgaagtccggaggtagtgaggttggccattttattgtgaaacagacggctgcggatggactggtagttgagtcgactactttcccggaaaaggtaccggctgaaggaggcaattatattgtgacactgataacaaacggtgatgtacaagtggcggtcgatagtgattggataaaagaggtcagtacacgtgctgcaatgtcagaagctgttaagagttttatcgtttcagttaattatggaactgctcgttcgggacttatcactttgactttaggaactttgacagagacggttgttgtcagtcaaatggccggtcaactgcctgatgagggtatggaaagtgatgcaatgacattggcggcaaagatgtatgcaggctggaatctcggaaatacgctggaagctattggaggtgaaactgcatggggaaacccgaaggttacggcggaacttatcaagagtgtgaaagagcttggtttcaatgcggtacgcataccttgttcctgggatcagtatatagaagacggagggacatacaaggtaaaagatgaatggctgaaccgtgtttatgaagtggtaggctattgtgtatccaatgatatgtatgccattgtaaatatccactgggatggcggttggcttgaaaacaattgtactgccgacaagcaggaagctaataacaagaagcaaaaagctttatggactcagatagcgaataaattaaatgtctatgatgagcatttgctttttgccggatgtaacgaacccaatgtggaaaatactgcccaaatggctgtattgaaatcttatgagcagacttttattgatgctgtgcgtactacgggaggtaacaatgctgtgcgcaatcttattgtacaaggaccgtctacagatatcggcaagaccgacaatctctttggcgacatgcctactgatgtggtgaaggaccgtctaatggtcgaggtacattactataccccttggacattctgtggtttggagaaggatgaagattgggggaggatggcctacttttggggagactataaagtcgaaggttccaaccgtaatgctacttctggtgatatgactgagatgagtgaattatttgctaaaatgaaatctcagtttgtggacaaaggaattcccgttatccttggcgagtatggtgcaatggtgcgtaccggacttggagaaaatcaagaggctcataataaatctcgcgaacaatttaatgaggtagtaactcgtgaagcgaaaaatcatggtatggttccgtttttttgggatggtggtacgtttgctatgattaagcgtgctgatggaacgataggtgataaatatacctatgatggcattatgagaggtgctaaagagggtaagtatccattttgatagaatatagaacagttttctaagtttcatatagatagtttttattaggttacaaaattgttaatatagttttttttgattggttatggagaagtctgtccgtgaggaatgtacttctccttcttttttctgcccatgaaacaaatgagggggataaaatgataaaaaaagacgggcttttcttgtttttttttaggctttttgcttcatttgcaataaaatatgtgttccttatctccgatagaatgaaaagattgctattacttgtcttatgggtttgggtagcttgcttcactgccgcttcgcacaactacatgtttaaacatttggaagtaaaagacgggctttccaataaccaggttaatgccatttataaagattcacatggattcatgtggtttggcacagcttccgggctgaaccgttatgacggctatgataccaggatataccgcagcctgaaggatgacggcaattcgctgccggatagttatattgaggacattcaggaagatgctactggaaatttgtgggtacgtacaggagcgggatatgccatttataactctgtatccgatattttcgaccgcaatgtggagggctggatgtggcatattgggataagtgggaatccttccactgtgtatattgatagcgaaaagattttctggatttatgtggcgggtaaaggtatttactgttataagccgggacaagagaatgcggtgatggtggctggtactgataccttgttgacagagatgaacataacagacatgacggaatgtagtgagggaatcttgttggctttcggcaatggagttctggcttgtctggatagggagaagttgaatgtaaaatggactttcgacggtattgccagtcaatgggggaaaaatcaatcagaaactttcactttgttcgttgacagtcatgaacgtgtctggatgtatagcgttgaaggaatgtgggtttaccatctgccgaagaaaagctgggaggtgcgttctgtcaggagcgatcgctctaacatggtacgggccatttcgcaggataagtatggaaacatttggattggtagagaccaggatggaattgaagtgataggtctggatggagagagcgtgcgattgatgaatgaccctaataatgagcgtacgatttccaacaatacggtgactgttctctatgaagataatgttggtaccatgtgggtgggcacttataagaaaggtgtttcattttacaatgaaagtagcttcaagtttggcattgtcgatttgggtgacattaattgtgtggaggacggacaaggggatattgtgtggttggggaccaatgaccgtggactggtgcgctggaatatggtgacggatgaacggaaaaccttttcgcatacggcagatccccgttccatttcaagcgatgtgattgtctgtcttcttcagggtcgtgacggccggttgtgggcaggaactttttggggcggactgaattgttatgacggtaatcgctttatccattaccgtgccaacaaggatgacaagaactcactggcttatgacaatgtatgggcactggccgaagacgctgaccggaatatctgggtggggactttggggcagggattgcaatgcctggaccctaaaacgggaatttttacaacctattctactgggaattccaatctggtgtcggattatatctcatccctttgtgtagggcgcaacaatacattatatattggaactgcagcaggcatagctgtcatggatttgtccaccaggaaaattgcgaactttaccggtacaaagtccggtaagaccactctctcaaatttggtcatcaatcaggtgtatgaagacagtagaggactgctttggctggctacacgcgagggacttaatgtatacgatccgcaacgggatgaaatacatgaagtccccataaaatccgatttctcgaaactactgatattaggtatcacggaagatgataataaaggaatgtgggtcagtacgggaggggagctgataaatgtggttctgctgtcggacaataagacgggacagatttcttttcgttgttatacttataacgataaggacgggttgcagacttgtgattttaatcagcgttctcttaaacgcctgcatacgggtgaaatcgtagtaggaggactgtatggactgaaccgtttcagacctgataacataaagtacaaccgtacactacctaaagtaatgtttaccggatttcaactgttcaatgaggatgtaaaggtgaacgaagagtatgcaggccatgtgatattgaaggaggcgctgaatgaaacgaaggaagtggtgctgacttataagcagaacgtatttacggtgtttttcgcttcggacaattatgtgttaccggaaaagacgaggtatctttataagttggagggattcaatgaggactggttgacgagcatgtccgatatgcaccgtgtgacctatacgaatctggctcccggtacgtatgagctgaaagtaaaggctacgaatagcgacggatatgcaggtactgaagaggcttgcttgaagatagtgattcttccgcctttttggatgactccatgggcatacacttgttatgtgctgttattgctcggtagtttgtttctggctttctatacggtgcagcgtagggagcgtaacaaattcaagatacgccagatggagcgggatgccaaaaagaacgaggaagttaaccagatgaaattccgtttcttcacgaatgtcagccatgaattgcgcactccgttgacgctgattatctcgccgttggagagtatgatgaaggagacggcagatgaaaaatggcaagacaaactgggtatgattcaccgcaatgcattgcgtctgctgaatttggtgaaccagctgcttgatttccgtaagaatgagatggcgggtttgcaccttactctttccgaaggagacattgtggcgtatgtacgtaatatctgtagctcttttctgatgctttcggaaaaaaaacatgtgcaccttactttcttttcggcggtggaatggctgaatatgtcctttgacgaagacaaggtgggcaagattgtgatgaaccttctgtccaatgcctttaagtttactcctaatggcgggagggtggatgtttcgttggaagtgctgaagggctctccggaaactctggaaatcaaagtatccgatacggggataggagtcaaggatgaagacaaggaaaggatattcgaacggttctatcaagcggagcacgaaggggaggataatcattccaccggaagcggtatcgggctaagcttggtgcgtgactttgtgacgctccatggtggtgctgtgcgtgtgttcgacaatgtgggttcgggcagcgtatttgtagtggatattcctatcaagcattcggtggtgaatgttgctacgcctttgtcggaagaagcggccgaagaagatgcggttgcgctggaagtgattggggggacaaatcgggaaaaggaagaatcggccggagaaaagaagaagcccttggtgcttattgtggatgataacgaagattttgttgccttcatgaaagacagcttgagtctgtatttctccattcaagtagctgccaacggacaagaagcatggaatgtcatcccggagctgaagcccgaccttattgtcagtgacttgatgatgcccgtaatggatggcaacgaactttgccgcagggtaaagacggacaagcatacggagaatataccttttgtgttgctgactgccaaacagtcggtagagaataaagtagagggcttgactatcggtgcggatgattatgtgacgaagccgtttaatatggaagtgctgatattgcgtatgcgaaagctgatagaccttagcggtaagaataggctgcgtacaaagattgaccccgaaccaagtgaaatagccattacttcgttggatgaaaagctggtggaaaatgctatcaaatatgtggaagcgaatattgcacgtagtgatttgtccgtagaggagctgagccatgagttgggtatgagccgggtacatctttacaagaaactcttgcagataaccggtaagacacccattgaatttatccgtgtcatccgtctgaaaagagcggcgcagatgctgcgcgagagtcagcaaaatgtatcggagatagcgtatcagttgggctttaacaaccccaagtatttcagcaaatatttcaaggatgaattcggtgttttgccctctgtttatcaggaaagagagggtaaataacaaaagataccccttacggaaacatattgtcttttagggtaatcaaaagcgcccttgtgtttcaacatcggggggacccgtttttgaaggaaactttctatttttacatcggagaaaattcactttaaaaacagtaatatgaaattgaaaaacacttcagtttatttgcttgccggatggatgctcgccgcatgttccggaggcggattccaaaagaccgagaacggtgttgttgtggaagtcaagcagcagcaaccgacggatgtgcgtaaagtaagattagaagtaatgggcgagaagctcattcatgtatcggctactcctgagaaggaattttcaaaggagcagagtctcattgtgatccctcaacagaataagaccgactttaaggtcgaagagcagggcgatgaagtgactgtcaagacatcggaattatgtgtcattgtgtccaagacaacgggtgaggtacgcttcacggatgccgacggcaagcagattctggctgaagactctgacgggcggacctttactccggtggaagtggaaggtacgaaaggatatacagtacgtcaagtattccagtcggcaggcaatgatgaggctttctatggcttgggccagcaccaggcggatgagttcaactataaaggtaagaatgaggaactgttccagtataatacaaaggtgtctgtacccttcattgtgtctaataagaactacggtgtgctttgggacagctattcgctctgccgtttcggtgacccgcgcgattactcacagctgggtgatgtcttcaaactttatgataaagagggcaaggaaggtgctttgaccggtacatatattccgggcaagaaagacgtggaaacccttgtacgtcgtgaggattctctttattttgaacatctggaccgtgccgcacatctgagtaaggtgattaatttgcctgaggagttcccgttcggagggtccgacgtagtttatgagggagaaatagaaccggcagaaagcggcttgttccgcttcatcctttactatgcaggctacatgaaagtatatattgataatgagttggtggttcccgaacgttggcgtacggcttggaatcctaatagctataagtttgctgtcaatctggaagcgggcaagcgcgttccgttgaagatagaatggaagcctgacgccggaatttcttactgcggtctgcgggcattgagtccggtggctgatgaagaacagaacaaactctcctggtggggtgaaatgcagaatgaaatagactactatttcgtttatggtgatgatatggacgatgtgattagcggctaccgtacattgacaggtaaatcccagattatgccgaaatgggcgatgggttactggcagagccgtgagaagtacaatacgcgtgaggaggttctctccaccttgaaggaattccgtgaacgtcagattcctatcgacaatatcgtaatcgactggctgcactggaagcaggattcttggggaagccatgagttcgaccccgaacgtttccccgatccgaaaggaatggtcgactccatccacgccatgaatggacgtttgatgatttccgtatggcccaagttctatgctacgaccgaacacttcaaggaatttgacgaaaaaggctggatataccagcaggctattaaagacagtattaaagactgggtaggtcccggctatctgggctctttctatgacgcatacgatgccgatgcacgcaagctcttctggaagcagatgcaagaccattactatcctctcggcatagatgcctggtggatggatgccagcgaaccgaacatacgcgactgtacggatttgcaataccgcaaggacctttgcggtccgacagcactcggcccctctgccaagttcttcaatgcatacgcgctgatgaatgccgaagctatctatgacggacagcgcggcgtggaaccggataaacgcgtcttcttgttaacacgttccggctttgcaggattgcaacgctattctactgccacctggagtggtgacatcgctacccgttgggaagatatgaaagcacaaatctctgccggcctaaactttgctgtcagcggtatcccttattggactatggacatcggcggattctgtgtagagaaccgttatgtggctggtcagatggaattcaacaagactggacgtgaaaatgctgattataaggaatggagagagttgaatacccgttggtatcagttcggcgctttctgcccgttgttccgtgcacacggccagtatccgtaccgtgaggtttggaatatcgctccggcaggacatccgtgctacaactccatcgtttattatacgaagttgcgttacaacatgatgccgtatatctattctttggcaggtatgacttatttcaatgattataccatcatgcgtccgctcgtaatggacttcacagctgatgcaaacgtcaacaatataggtgaccagttcatgttcggttctgccctgatggtggctccggtttacgaatacggtgcacgcaaccgcgaggtttatttcccggcaagctgcggttggtatgacttctactccggcaagtatgtggacggtggccagaagctgacagtggatgctccttatgaacgtattccgctctacgtttgcgaaggtgccattgtaccttatggtccggatatgcaatacagtgatgaaaaaccggcttcggaaatcacactctatgtctatacgggtaaggacggtgcatttacactctatgaagatgaaggtgtgaactataattacgagaagggacaatatgccactataccctttgcttataacgatgctgaaggtacactggttatcggtgaccgtacgggtgacttccctggtatgctgaaggaacgtactttcaatgtagtgaaggtaagcaaagatcagccgcaaccgttcgatttaaaggcgaaaggcacaacagtgaagtatgccggaaaagcgcaaactataaaattataatcagaatgatagacgacggtgccagggagagaaatcttccgggtgccggtctcgttgttccccggtgccagaaacttccctgcttctgaatagctgtaagagaggaataggcactcgataatcttttagatatttattaccatgaataaaatcatattgtctttggccatcgggctgtccctgctggttggttgcaatgctcctaaagaggtagctggcgatgaccgtagcttggattttactgccgactgggcctttcgcttgggagacgatacagcggcatcccgttcagattataatgacgcagactggcggaaactgaacttgccccacgattgggctgttgaaggagagttcagtcgggacaatccgtcaggaacagggggaggtgctctgcctggtggtataggttggtatcgtaagacttttattgccgataaggtcgatgagggcaagcgctatcgcatagatttcgatggtgtctatatgaactccaccgtttatattaatgggcatgaactgggaacacgcccctatggatacatctcgtttagttatgatttgactccttatattaaatggggggagaagaatgtgattgctgtaagagtggacaatgccgaacaacccaattcacgttggtattccggttgcggtatctaccgtaatgtgtggttgacgaaactgaatccggtgcatgtggcacagtggggtacctacgtgacggcagaagaagtgtcgaagaacagtgcccggttgaagatacgtaccagtttacagtacgatgtagagacgcagacggaagatttcgtgcagcaggccgacggtacatatgttgtgttcgattcggaaattattcctctgattgatgtcgtcctgcaaacccggttagtggatgccgacggtcatgtggtaggtgaggctgtgtcggaagctcagctgatgcctgtcgctccggcagaaatggagcaggaaatagaattgaagaatcctaatctctggagtattgatgcaccttatatgtataaggtagaaagcatcctcaagaataaagagaccggcgaggtactcgaccgttattatactcctaccggcatccgtactttccgcttcgatgcacaaaaaggatttatcctgaatggtgaacaagtgaagataaacggtgtctgcatgcatcatgacctgggttgcctgggagctgcggtgaatacgcgcgccatcgaacgccagttggagattctgaaagaaatgggttgcaacggaatccgttgttcccataaccctcctgcaccggagctgctcgacttttgcgaccgtatgggcttcatcgtgatggacgagactttcgacatgtggcgcaagaaaaagacccgccacgactattcacgctatttcaacgaatggcacgaacgtgatttgactgaccttatcctgcgtgaccgcaatcatccttccatcttcatgtggagtatcggcaacgaagtgctggagcagtggacggatgccaaagccgacaccttgagtctggcagaggccaacctggtcttgaacttcggccatagtgcggatatgctggcaaaggacggagaaatgtccgtcaactcactgctgacaaagaaactggcggatatggtgagaaagctcgatgccacgcgccccgtgacggcaggctgcaacgagccgaatccgaacaatcatttgttccgttccggtgcgcttgatattatcggcttcaattaccatgacgactggtttgcaggtgttcccgagaacttccccggtaagccgttcatcgtaacggaaagtgtttccggcctgatgacacgcggttactaccggatgccgagtgattcgatgttcatctggcccgaacgttgggacaagcctttctatgatgcctcgttctcttgctcctcctacgacaactgtcatgttccttggggcaaccgtcacgaaggtactatgcgccatgtaaagaacaacgactttatcagtggacaatacgtctggacgggcttcgattatatcggtgagcctactccttacggttggccggcacgtagctcttactttggcattatcgacttggctggcttcccgaaggacgtctactatatgtatcagtccgagtggcgtccggacaaggcggtgttgcatcttttcccacattggaattggacggagggacaagacatagatttgtgggcatattataacaatgccgacgaagtggagcttttcgtgaatggaaagtcgcagggtgtgcgcaacaagggaaaagacgatttccacgtcatgtggcgcgtgaagtatgagccgggtacggtaaaggctgtttcccgcaaggaaggaaagactgtggccgagcaggaaatccggacagcgggtgaacctgcacagattcgtctcagccctgaccgcagtaccattcaggcagatggcaaagacttgagtttcattacggttgagattctggacaaagatggaaatttgtgtccgaatgccgaaaacgatgtgacctttgccgtagaaggtgccggcttcatagccggagtggacaacggaagccctatttctatggagaagttcaaggacaaccaccgcaaggctttctacgggaagtgcctggtggtactgcagaacaacggtgaaccgggtggtgtcaaggtgacggctacggctgatggactggagaaggcgacgacaacgattaaaattaaatgataatttaatgtgccaattaagatatgaagaataaatttttagcaaccctattattgacatgctccatcagtaccgtgtctgcacagacaccggtctatatggacgatgcacaacctattgaagcacgtgtaaaggatgcccttagtcggatgacgctggaagagaaggtagccctttgccatgcgcagagtaaattcagcagtgcgggtgttccgcgactcggcattcccgagctttggatgagcgacggccctcacggtgtccgtgccgaaatcaactggaatgactggggatatgccaactggaccaatgacagcattaccgctttcccggccttgacttgtctggccgctacctggaatccggacatgtctgccaagtatggcaaggccatcggtgaggaagcgcgctatcgtgaaaaggatgtgttgctgggccccggcgtcaacatctaccgcactccgatgaacgggcgtaattttgaatatatgggcgaggacccttatctggccagtgtgatgtgcgtaccttacatccaggagttgcagaagaacggagtggcagcttgtgtcaagcactatgcgctgaacaaccaggaactgtggcgcggacatattgatgtgaatcttagcgaccgtgctttgcatgaaatctatctgcctgcattcaaggctgcggtagaagaaggaggtgcctggagcattatgggcgcttacaataagattcgcggccagcacgcctgccataacgatttcacactgaacaagattctgaaagatgactggaagttcgatggctgtgtcattaccgactggggcggtgcccacgacacctatgaagctgccgtcaacggtctggatattgaaatgggttcttacaccaacggtctgacgtccgagagtgtatttacctataacgattattaccttgccaacccttacctccagatgttgaaagatggcaaagtgccgatgtctacaatagacgacaaggcttcccgtattcttcgtctgatattccgtacggcgatgaaccgtcagaaaccctatggttcggtagctacggaagagcattatgccgctgcccgcgagataggcaatgagggcattgtgctcttgaagaatgttccggtggtaaagaaaggtgttccgttgctgccgattgatgcagccaagtatcagaatatcctggtggtgggcgataatgccgtacgcttgctgaatcagggaggaggctcttccgaactgaaagtgaaggatatggtatctccgctggatggcttgcgtgccgcttatggcgataaggtagcctatgcgaaaggctatgccgccggtcgtccgatgtacggccgtgcagatgaaattccgcagaatgtggtagactcactccgtgcagaagctgtggaaatggcgaaaaaggcagacttggtggtattggtaggcggattgaacaagaaccacttccaggattgtgaaggcggcgaccgtctggaatacggcttgcctttcgggcaggatgaactgattgaagctttgctgggtgtaaacaagaatctcgttttggtacttctcagcggcaatgcggtggaaatgccgtgggtatcccgggtccctgccattgtgcaaggttggtatttaggctccatgggtggcaagtctctggctgacatcttgagtggtgcggtaaatccaagcggaaagttgcccttctctttccctgccaagttgacggattgcggtgcacatgctttcgatgaactcagttatccgggcgacagcattaagcaggagtacaaggaagatattctggtgggctatcgttggcatgacaccaagaagattccggcactcttccccttcggtcatggcttgagctatactacttttacatatggcaaaccggtggcttctgccaagaccatggctgccgacggtacgttgacggtgacagttgccgtgaagaatacgggtagcattgccggaaaagagattgtacagctttatgtaggcgatgataaatgcagtgtgcttcgtcctgtaaaggagctgaaacattttgcaaaagtcgctctggcaccgggcgaggagaagagtgtgactttcacccttactccggatgatttgaagttctacgatgaggcttccgcagcttggaagtacgaatcgggtaagttcaaggcatacgtttgcgcttcgtctgccgacgtccgtggtgtagtttcgttcgaaatgcaataaacttataatcagtgcgtaaccactgcaaaatcagtgcaactattttgcagtggtactgcataccttttgcagcgctactgcaattgctttgcagcgtcactgcaaaaggtatgcagcaatgctgcaaaatgtatgcggtaagtttgcagcctgaaatcagaatcaaaaaacaatatgaagacacttgccactctatttctgcttgcagcctcgttgctgcttcgtgcagccgatgcgcctgccgacagttgtaatcatcagctatactatacatcgcccgccgctatctgggaggagactcttcctttgggtaacggacgcttgggcatgatgcccgacggaggcattctccgtgagcacattgtgctgaatgaaatttcattatggagcggaatggaggcggattatagcaatccggatgcctcgaagagtctgcctgccattcggcaactgttgtttgagggaaagaaccgagaggcacaggaactgatgtacagcagttttgttccgaagaagcaggagactgacgggagatatggaacctatcaggtattgggtgatttggatatagattttacctacaattcttcattatccattctcaattctccattaaacaactatcgccgttggctcaacttacgcgatgcggtggcatacacggctttcaggctggaagatgtcgattaccgccgtgagtattttgtttcccgtgaccgtgatgtcatgctgattcatctggttgccggacatgaagggactctgaacttctctgcccgtttgagccgtgcagaacatagcctggtgactgtccaagggaacacccttttgatggacggcatgttggaaagcggtaaacccggtttggacggtatgaaataccgtgtggcgatgcaactcgtgcagaacggtggtgaatcatctgtcagcccgggaaatggtatctgcttgaagaacgggcaggaagcctggttgatactttctgccactacctcctatgccgctgccggtacagacttcccgggcgaacgctatgcggaagtctgcgacagcttgctccgtcctttcaccacccccgctaattctccatgttccattttccattcttcattatccaaccatgtcactgcccaccgtttcctctacgaccgtgtttccttgacgcttcctgccacgccggatgatacgctcccgacgaacgagcgcatcctccgcttcacacagcaggagtcgccggcattggctgctttgtactataactacggacgctatctgctcatcagcagtacacgccccggcagtctgccgcccaatctgcaaggactctgggcaaatggagtatcgactccttggaacggggactatcatacgaacatcaatatccagatgaaccactggcctttggaacaagccggtctttccgaactctatcaaccgttgacaacgttgatggagcgccttgtcccttcgggagaagcaagtgcgcatactttctatggcgatgaggcagatggctgggtactccacatgatgaccaacgtatggaattataccgctcccggtgaacacccctcctggggagctaccaataccggtggcgcttggttgtgtgcccatttgtgggaacactatctgtatacgcaggacaagaattatctgcgtcgtatctatcccgtcttgaaaggtgccgcccggttctttagttccaccaccgtgcaggagccttcgcatggctggctggtaactgctcccacttcttctccggaaaacagcttctatgtgccgggtgacagcgtgactcccgtcagcatttgtatgggtcccactatggatgtgcaactgcttaccgagctttataccaatgtcattaccgccgcccgcctgctggattgtgatgcggactatgtggcgaagcttgaggcagacctgaagaagtttccgcccatgcaaatcagtaaggaaggatacttgcaggaatggctggaagactataaggaagtggatgtgcaacaccgccacgtttcccatctctacggcttgcatccgggaaacctgatttcgccggagtccacccctgagcttgccgaagcctgccggatgaccttgaaccgtcgtggagatgagggtaccggttggagccgtgcttggaagataaacttctgggctcgtttgggcgacggaaaccgtgcttggaaactcttcaagagtttgctgcatcctgctgtcgatactgcgacgggaggtcatggtagcggcactttccctaatttgttctgttcgcatcctccttttcagattgatggcaactacggtggcgcggcgggagtcggcgaaatgctgctgcaaagtcatgaaggctttatccatctgcttcctgccctgccggatagctggactaccggcaacttccgtggaatgcgcgtacgtggcggtgcttccatagacctggactggaaggatggacgggcaacgagggctgttgttaccgctcttgttccgggtaaattcatcctaaagatgcccacaggcgccgtccgtgcccaagtgaagataggaggacgtacgcatacttacaaagaaccggtatttccgttggatttgaacaagggagaggcggtgaccatacatttcttataggaacgttcccctccgacaaaattatcaagttatttgtctttcgcgtccgaatactgtacatttgcagtgcatgtagaacaaatatcttagataattatgaaaaatagagtacgttttttcttcttgtttctcggcttgctgggaacgttggcagttcatgcacaaatcaatgagttgccacgttccacacccgaggcagaaggagtcccttccaaggctgtcactgccttgtttgattcactgatggcattgccgaaaacagacatccacagcgtggtggtggtgcgtcacggcaaggtcatcggagaaatctatccggctccgttcgcaccggaatatcgccataccatgtattcctgctccaagacctttgtcggggctgccgtagggctggccattgcagacaaccgcttgcgcttgacagaccgtgtcggtgctttcttcccggagcttcttccggattcggtttccgctaatctggcagacatgactgtccgcgacctgcttaccatgacatcgggtgtcactcccgactggaatatgcgcaatctcactcccgactggatacgtaccttccttgccaaaccggtgaaaactccgggcaagaagtttgaatatgattcgattagtacctatatgctttctgccattgtgcagaaggtgacgggcatgaccttgctggattatctgaagcagaagcttttcatcccaatgcatatcacggacgttgcgtgggaactaagccccgaaggcatcaataccggtggctgggggctgcatatccagagcgagtcattggcaaaattcggattgctgctgctgaaccggggtgtttgggaaggcaggcagttgcttccggcttcctgggtggagcagatgatgaccagacagataggagattatggctatcagatgtggctttgcgaatatccgggtgctgtacgtgctgacggggctttgggacaatacattctgattgttccggataaggatatggtagtggtcattaccgaatgtacattgatagacggtcgtcggcagcgtcgtttggtctggaaccgcttgttgccggagacaggtgaccaggcattagtgcccggtaaggactacaagcgcctgcagaagaaacagcgttcttatcaactgccgttagtgcaaggaaaggctgcttcctccctttcacagaaatacgcaggcaagcgcatcctgctcggagagaacaaatacggatggcaatccatcgagctgcaatttaagcagcaagaagtggtgatgactgtggtggagaaagacggaaagacatacagtcttccgtttggctataagcaatggtcgaaagcggcaattgatggctatcctccgtattcggttgctgcaaaggggcgttttaagggtatagaaggccctttccaggtagcaggcagttatgcgtgggcgtcacctgatgctttgcaactgaaagtacattatgtcagctggataagcgcccttgggcttacgctccgctttgaggataacaaggtactcctgactgttacggagaattattcttcgggtgaaggggtgactttcgaaggtacattagcacattaaaataatgaatcatattttgcttactctaaaacggccttttatctggctgtaccgttttcggcaccgttgcggctacggtgtacattctccttttgcctttaacctaattacgcatgtaatttacgaaagtacggcttattataaatatgaagagctggccaaggcacagaagcaactggagctggagaaagatagacgttggaagtacgaatcgaagaaagtaaaacgtcttctgttccgtctggtaaactatacccagccggagaccattgtagatgccggtacgcttgccgcttctgccctctatctgaaagcggggaaggagggggcggattatacctcggcttccgacctttccgagctctttctggagagtggcgttcccgttgattttctttatttgcacgattatcgtcgtcccggttttgtagaggaggtcttccgcatctgttccgcccgtaccaggggaaagtctgtttttgtgattgagggtatccgttacactccgcagatgtctgccctctggaaacgtatgaagcaggacgggcgggcgggtattacgttcgacctttatgaccttggtatcctattcttcgataaaacaaagataaaacaagactatattgtcaacttttgattatctttaggcgtttcaatagtgattagcggttagtgattagtgcttagctccacttactggctgctaaacattaatccctaacccctaaacattaattccttatgaagatatacactaaaaccggagataaaggaaccacctctcttgtaggtggaacccgtgtacccaaaacccatatccgccttgaggcgtatggtacggtggatgaactgaattccaatctgggtcttctcatcacgtacctgcctgacgggaaggataaggattttctgcagcaagtacaagacagactttttgccgtaggctctcatctggccacagaccgggagaaaatggagctgaaagaagccagtatcatcggcccggagcaagtggaaatggtggagcgggagatagaccgtttggatactcttttgccccctctttcggcttttattcttcccggtggaagtcgcggtgcggcagtttgtcacgtttgtcgtacggtttgccgccgtgcagagcgtcggattcttgctttggccgagcaggtggaaatcgcttcggaattactggcttacgtgaaccgcttgtctgattatttgttcgtcctttcccgtaaaatgaatcaagacgacaaaaaaggtgaaatattttggaataatagttgcaagtgaaataaattgttatacttttgccgaaaaatagaaataggacttaatattcacaattttaatactagagactatgtattggacattggaattagcatctaaactggaagatgctccttggccggcaactaaggatgaattgatagattatgccatgcgttcgggtgctccgcttgaagtgattgagaatctgcaggaaatggaagatgaaggcgagatttatgaaagcatagaagatatttggcccgattatcccagcaaagaggactttttcttcaacgaggaggaatattgatacgctttaaaagaaaaaacttaccggtatgtctggtaatattttgaaacatagggagaagtaattccaagaccgataactatggttgaagaattacttcttttcttttaatcccccctacaataataatggatgtacaagaagcaacaacatgtcggttgccggatttgaaggaaaggcatctgcctgaaaactgccgcgaagccgtgaacacgattttaaaggagacttacggctacgaacagtttcgtaatcttgagatttacgatgatttgttcaagggaaaggaaaagctttgcatttcgcagggacagctgatagagaacgttatactggaggctgaagaggcttggaaaggtgaaacgaagatagacaatatattgttgactgcccctaccggttccggaaaatccatgttgttccagcttcctgctatctatctggggaaagaatataatctgcttaccatcgtggtctcccctttgaaggcgttgattgtagaccaggtggaaagtctgcaagaactggggtatatgcgtgtggcatatgcctcgtccgatttatcgccggaacagaagatggaggtttatcggcaggtgcgtgagggggagattgatttgttctatctctcgccggaattgcttctctcttacgacatcaagcattttgtaggcgaacgccgcatcggtctggtagtggtcgatgaggcacatacggtaacgacatggggcaaggagttccgtgtggactattggttcttgggacgttacttgaatacgctgaaacagactctcggttatagtttcccgttgtttgcattgactgctacggctgtctggaacccgaaagggggtaatgacatgatattcgagactatccgttctttgcagatggagccttgtgtgctttatgtaggtacggtgaagcgccggaatattggctttgacatccgtcagatggagatggaggacggggagacatacgacaaggcaaagcagcgcgtagttgctgcgcgggtcgaaaacttcctggacggtcacaagacactgctctattatccttttgcgggtggcatcgacatgcgcttgaagacgtgggtgaagccggcagactggcgtctggtcgcctcctattatggcaagaaggacaaggaacagaaagctgccattgtgcaggagttcaaggaaggaaccaagaaactgattgtggctacgaaagcctttggtatgggagtagatatcagtgatatagaccgtgtatatcatgtggcgccatccagtacgtttgtcgactatattcaggagatagggcgtgccgcgcgtgatacggagatacagggtattgccgctaccgactaccatgagcgtgacttctattatatgaagcgtctgcatcagacggggaacattgcccaggaacagctggtgcttattctgagaaagctcatggaagtgtaccgcatgaaaggggaaaaaccggaaatcatggtgtctttgtctgatttcgagtttgtggtgaaactgccgcgtacaaagaacaagttggagtatgaagcagagttgggacagctcatcaagaccgccttgctttggctggaagacgatttgatgcagcgttatggaaggcatctgcttgaaatcagccccaagaatctgttgactgaaggatatgtccaggacaagacgggtgatgtctttgcccgtgaattccagagctatctgacaaaggtagaaggggaggacggggtttacgtcgcacgtctggaagcgctttgggaagagcgtttcccggagcttggctacaaggagttcaaacagaaactgaataatggaacgttgtgggagggagcccgtgccgtgtctgtaggcaagcatgaggtgctgttgaaggaagatgcctccgtcatccgtgaacggatggatgccttgttcaagagcttgacaacgatgctgaaaacggcattgataaagtcgaaaggacgttttgatgaagaagaactgcgggctgtctttgccgagcatggcatggacgtgcgctctgccaaacgctttatcggttccctgctggagagtcgcacggaggaaggccgcagtgtaagctatatcagcagcgtgaaaaagaaggattccaatgaactctcttttacggtgaccaaaggctttgatttgcttttgtcgcgctatcaaaaactgttcagccaacgcatagtgggcagtaagggagaccgcctggtgttttattgcactcctttctcggacttgaatatgctgcttaatctgctttctatgctcgactgcctttcgttcagtgtggagggtggcggtacgccttgcgtatttgtccgtttcaatgaccccgaaactctgcaggaacttgcgcttggcgatgattaccgcaatctgattctggacaccaacgagcaggtattccaggaacagatagctttattctccttcttctttggaacggataaactgacggatgaacagcgttgggactttatcgaggattattttacgggaatgggagtggacgacttgaaggtgaagtttgcgtaagctatcgttctgttttctggaatgccagccgttcgtccccattggccagaaaaatgatgccgcaatactggaaaccatgtttcttcagtatgtattgcaggatgcggttgtcccggtgggtatctgcacgtaggttggggatttgttcgtagcaccattgcaggcaggcattggccactcctttgctgtgctctgtgcttgccagccggtggatgactccgtaaggctgtgtgttttccagccattctccttcgtggatatgtgcatatgtagggtcgtttccacggataaaggcgaaagtcccgatgatttctccggtatcgtcggtgcatacgtaactgttgccttgttcgatgtctgccatgacgagttcgcgggagggatagttgcccgtccattggtgcatgttgccatctttccgcatgatgcgcttggcctgctcaaagatgtccataaggacttccagttctgtgggtagtgtctttctgatttctatcatagtttttattttgtcagcgtgacattttccttgatttatgttgcaaaggtaatgtgttttgtgattcattgttctcgtaaatgaacaaatgctgacatatgttgtttctttaggaagaatttgcatatatttgtcccgtaatattaaacacaattgattatgaaaaagatttttagtgctttcatgatagctgtatgctgtatgcttatggctatgcctgttcaggcccaactattgaagtggggtgttaagggtggtgtgaatatgacgaaaatagattgggatggcggatataagggaaacaaggataattctaccggtttctttattggtccgatggctgagtttaccattcccattgtaggtttgggtatcgatggggctttgctgttctctcagcgcggcaaggacgaggtgaagcagacaggactggaagtacccgtaaatctgaaatataccattggcttgggtagtttgttgggtatttatgtggcagccggtcccgatttcttcttcgattttaagaagaaagactacgtagaccgtaagaaggctcaagtggcacttaatttgggtgccggtgtgaagctgctgaagcatctccaggttggagtgacctatcagctcccgatgggcgactcatttacgtggaagaatgcgggtgatgccatcggtgccaagaataagacttggcaggtgtctgcggcgtatcttttctaaatgtagtaaaacgatttgtggaatataatataagaaaggctctcctacaaaaggagggcctttcttgcgtttttgattacttttctacaattacatctactggggcaggtgcatcattgtggagtggggtagcggcttcgcgactaggctgtctgccgtctttgatggcgagtacccattccccatttgcttttatggggttgaacatgaaccccatactactacctggagtgtcagaatctgaacgtggcgtaaattctattttgtacttcacgtcattatttccttgtgtagagaagctgaggtaatccaatcgataacgaattaccgggaaacgctggaaacgtttggtaagtgcttcccgttgttgtatcgttaagggtttggctatacctgcgtcatcaatggagtaaagcatatcaagagccttgtcagtctctttagcttttagaagctcctgtacataatgtaagaacaacgcttgagtctgtagcagtcaaagtggctacaaactcatcttctgcctctttctgtgtcttcatcttctcttcgtgtccttttgttgaacatgctccgagtagaaagcttgctgagagaagaagcataaaaaggatttgtttattgttcattgttgatatatttattaatcatgcattgttaaagaaaaaggtgcgtcaccttattatgacgcacctttattatattaccgtattttaggatgcgatgagttctttacaaaattatctgttggcaatagtaccatcaacagcaatggcaactttagcacttactgtaccccatgtgtatgtgacctttacaggaaccatggtggtgaagtctttagtgtttttctctccaaagttttctacatgatggatacacagtaaatctgccaattcaatagaaccaccattgtattgtgcaggaacagtatatacgttttcgatagcttccttagctgtcttatacagttcaggcttacaagtgctttttgttacgattttgctgtcatcggtatacgcaatggctttaaagccttgaatcatcggcatgatggctgcatagtcagaagtaactgtagacttttcttcaccttctttttcgccattaatcaatgttgcttccagagctgcgatagaaatatagttgttttcaccgagagtgctcaaattgcccttcttcaaatcctctacagagagtttgtatgtagcatacattttttcgccgtcaatggtcttaccagcgttttggaagataggggttaccacagcaggagtagctgccaagaatttccactcaatatctttcagcttggcattcagcgggttcaagtgatagtacattgcgctggttgaaggcatccaataagttttcttagtggcatctttcaaagtaatccaattggtagcacttgtacctttcttgattacataagctacagttctcatccttcatgttaccaagggtcagagtttcatcttttgtattccaaactgctgaaagtgttccttccggtaaccatttcgtagtttgtacttcatataaaggatctttacccttctcttctgttactttcacccagtagtcagcttctgcttggccatgcaacttaccagtctcttcagtacctggatagtaatagatggttttagcctcttttacaatactccagacaggagcatttgtgccgtttgttccattcttgataaaataagaatcgccattgcttaatttgatgacaatgccatcttctgttttgtcaacgccggtaatgaccgactccgcgtcaatcttagcttgaaggtcacttaccagcttttctactgctgatacgcgattatccaagctttcgatgtcgtcatcatagtccttacaagacgtgaaagttcctgcagtaccggccattaagacactgaacaagaacatacttatgtttataattgaaaactttaaatttataaattttaaaaaataaaaagtgaataatctcgcatatttggtattactttctcttatttttttgttaaaattttccgttacttcgcaggtaacggaggaattttccgtgcaaacataatcgtttttctataaatgagcaaataataatgctgtttttttataattaatcgaaaaatctgcatttaagcgcacttttttgttaatggaattgttgttgccccagctattagcgtatttgtacgtgtgttctgtattacagaggagttacccttatacatattataaataagaaatgtataattaaaattgaagatgaaagagattaccttacaagaaatgctgtcaactattattggagagcttcggaaaaatggaagatggggaacagcccatatttaccaatccacattgaatgtgttttccgtattcaacaactatcagaatttgcatctgcgcaaactgaattcagtggttttaaaacgttttgaaatgtacctgcgccaacgggattgtagttggaataccgtttccacctatatgaaagtcatccgttcggcttataaccgagctgtagatttacgatatgtccgttatattcccaggttgtttgaacatgtgtatacgggaactaaagcggacaagaaaagagcattggaagcttcggatataggagctttagtttgcgagacagagatggatttgtccaaaaggattccctcctcgagacttcaaaaagcaaaaatgctattcgtgtttatgtttatgatgcgtggtcttccgtttgtcgatttggcttttttgcgtaagaaagacttgcaaggtaacgtattatcctatcgtagaagaaaaactggtcacaccttgcgggtacttctgtcccctgaagccttgcagttggtacgcatggtgtccaataaggacgaaaactcaccttatttatttccaatattacatagcaaggagggtaccgaagcggcttataaagagtatcaatcagctctgagacgttttaactatcagttatcaactttaaaaacacatttaaacatgagttcacatcttagctcgtattcggcaagacacacatgggctacaatggcatattattgcgagattcaccctggaattatttctgaagcgatgggacactcatcgataaatgttactgaaacctatctcaaacccttcaacgacaagaagattgatgaggcaaatgagaaggtaacctgaattcaaacagacaatgcaacagtgtcgaattcattgttagttaataatttatatttttcctttggggtcatgtaacccaatctttttctcggtcttgagtttaagatgttttgaacgcgcattacctgttcattggttatgtccctaaagtccgtacccttcgggaagtattgcctaatcaaaccattgctgttttcattggctcctctttcccacgagtggtatggttttgcaaagtaaacaaaaatatttagtttacgtgcaatttcttcgtgaaaactaaattcttttccattatctgccgttattgtatgtatttggtctctaaaaggttccaaggcatcgatggcagctttagttagcgggctggcatctttcccgctaagtagtcttatccatactagtccagttaccctgtcgtttatagttaatagtgctcctttgtgattcattccaatgactgtgtcaatttccaaatcaccaaaacgtactttcttgtctactatcgtaggacgcttgtctatgtccacgcggtttttgataaaaccacgtccattagtcaatgcacctctcttcttatgacttcttccccgtcttcttaaatgcttgtataacaacttatctccatgctttttatcttcccaaatatactggtagattgtctcatgagaaactgtttccaagccctttgttcgcataaacccagtcacttgttctggactgaaatctttctttatgagtatatctacttgaattttcaagtcgtccgtaaacttcacgaagtgctttcgtgaacgcattctggacatatacttagcctgagcgagatccggtttgtaaatgccattacgtttatcactattacgacgtaattcacgacttatagtgctacgatgaactcctacaagattggcaatctcggttcttgactttccgctttgcagataagcggaaatgttatacctttgttcttcggttagctgtttcatattgcaactgaatgttggggaactggaagatgcaaagaaacaacttttccacaggggaacaaaagggaaagaaatcttctttctctgttcctctgaaaaattattcttttcgtatcttctcattgtcatcattctcactcctgttgcattatccgcttgaacttaggtaatttcttttgtgaaaagcaatggaatttcggcatagtttttttgctttttattgatagaatagtctaaatatgtacttatttattcctcccgcaagagacttctcttgaagggaaggatcgccttgtttgtttctcagccaccttttcttatgtcaaagtactacaaaataagactttatattttcccctgtcttgcaaaccttttgagtctctttcacctcaatcttatttcttagtcctattataagaattccacctataagcccctccttatctttattcatttaaaatattataaacaattatagatgtatcgaaactgtattaaacatgtttttatacaattgattaaatatagattcccgttacctgcgaagtaacggaaaattttaacaaaaaaataagagaaagtaataccaaatatgcgagattattcactttttatttttttaaatttataaatttaaagttttcaattatgaacaaaaagtttctaagtgtgatcctgttcagtgccttaatgactggtactgcaggaacgttcacgtcttgtaaggactatgatgatgacatcaaggacttgcagggacaactggacaagaaagcttcacttgatgaattgaactctaaagtaagtgctttggagacttctatcgctgaagccaaaactgaagcttctaatgctaaaacagcagcacaagaagcactggacaaagctaaagaagcattggacaaagcaggacaaggtggatcttcttctgaagaaattgcagccttaaaagccgctctggagaaagcgcaggcagacttgcagaagcaaattgacaaaatggcctcattggagactgtggacaagaaaattgcagatttaaagaaagagcttgaaggaggcttcgttacagacgaaaaattacaagctttggctgcaaaggttgatgccctgaccgctgaggtggttaaattgattggacaccgtctgactagtctagctctgatcccgactcagcatatcaacggtattgctgctatgacttttaccactttgcagtatactcctcagaagtatgaggcaatgcctacacatacgtctgatccttcgggccacactaaccgtcctgtgttagaccacaaagatgccggtacagcccgttacatcgctactgagaagaataaggcttatttccatgtaagcccgagtgtaggtgttcgtactcaagatatcctgactccgtcatttgactgcatcaagtctgaaaatataatgacaaagaatgctgacggtacaacaattacaaacaatagcccgatcgaagttacaggtcacaatattgacaaggaaggtgtactggaagttacattcaaaaaacattctgatttcttaggtcaacagctctctaccactaaggaaggcaataaggagaaattctatatggcttctttgaaagctcctatttctgcagaaaactatacagaagacgaagctaaggatgttgaagctggtactattgatggcgtttatgtaaactctgaatatgctcgtattgaagagcttatcaaattgccgtatttggctaacagcagaactgattttggaaaaaccataacaggtgaattcgcagacgaaatacagaatgatggaaacggtgatttctatgttcactatcatgactcagtatgtctgtatgaatcaaatgcaaatgctttagttgactattaccaagcttatgaccaacctcttgatttaaagaaattggtaaaagtttgtgttagtgacaaagccaatgatcatgccgcacatgaggatttggtagactacaaggactatggtctgacattccgtttccgtctggcagaagccgcttatattcctgaaaacgacaatgacaacaagactgaccaacaaaaatttgcagaaatcgattctccgatgaatggtaaaatgtctgctaaagtatatgacatccctggatctgcaacagccgtaggtcgtgagcctattgtttgcgtagaattgatcgactctgtaaatggcaatgcattggttgctcaacgttacttgaaggttaaatggacaatggaaggaaaagaactggcagttccgttcaacccggtattgttctcttgtacagttaagaaccttgtcgatacagaaatgatgaataccatgatttacgacaaggctaaagaaggtggtatgacaaagaacgaattccatgctatctatactgaattcattgtaggtgagggagctggtacagctgaagatttgaaagatccggaagaaggcgttgagtctcacaatattttgtggacattaaacgaagaagatcttggtgtgttctggcctggtcagcaagagaagacgttcacgaagactgttatctacaaagatcctaagggtatcaatgctgatattaccgttgtaatgacaagaactgtctatatgcctgctttgaatgtatggggccacatgggtacatactggaaaggtgaaaaggaatataagatattcaacatcaacccgatcgtttatggaaccaaagaatctaatccggcatggaatgttgttgacggtactaacccgacatgtaacatctatactgacttgttgaacggtttcttggatgacagaggtgtgaaacctactgaaggtgctgctggcgctatctattatacagataagaatgtagctaatacgaagttctattatcctgcttttggtccgatgcaacctgaccacactatgcctgaaaatgctaacggcatttactatgcagaagaaggcgtaagattcgtattcgataaggcaagaatcgccaactatacttatatttggaacgatggtactgaagtgaaggctgagttgagaaacaatgatacagaattgtggattaagggagaattagcagcaacaatcgtaaatcacaaggctaaccttttgaacgcagacgagctgacgtacaacatcaagttgcaagaagctgttcctgatcatgctgttacagatttcactaatcaaccgacagaagctgctaaggcattggttggtaagatggttcccatcaacttggttgctgatctctgcaataatgcaaagaatgtaggcattgttaagcaatacgaagcaaatattattgagccgttgcaagttaagaagggcgaaatcgacaacttcgttgacgccaagaacgaaggtagctcaattgatgtaactggtgcattcacttactactcttggaatgacaacaagcagattgtggaaaacacaacaggtctgccaaaagcattgtatgacttctatcaagtaagagaagctgtttggccgttgaaggctggttctgacaatattctggatgttactaagatcaagactaacttgaaactgactgacggtaacttggaaccagaagaaggttatacaaatggtaagttgcctgcaaacattgaaatcagatatgaagaaaaagatatcgatggtgacggtgacaaagaaaaagtcttgacttattacaactatagcggtactccggttaacaaagcttataagctgtttatcccggttgaatacggttataagtggaaaactctcatcaatgtttatgagattactgtagctcctaactctggaactcctggtacacgataagtaaagatcgttagatactgatatattaaagggtattccttaatgggataccctttattgattaaataaaaacagatgaagatgaaaagatttatttactcttcaatgctcttgatgggtatctgtgtgttagtagcctgtaccggaaaaagcagtagccatccctttggcggcactttttttacggaagaaggagtacgctttgaacttaaagcggattcaaccacacttatccagtttaacgactcgctgacttatgaaggtacttggcaagtctgtaaaagtgcagataatttggaatatgctacaattgagtttgccggatatcctgcttactatttcctgaaagacggaaagctctatcgtagtgaacgggaaatgcgcaatgacgtattgggcagaagaatcaattacccaaaatgatataagctagatattccatactagaaacgaaggtgtgtcgtaatgcacgatgcaccttctttcttgtttatcaccgatataaatcggtttattttcttcaagctgcgataattcgaagatttctttgatttatgtgtctccagcatctaaataaagcgacagtaagctcataaaaccatcctatcagccagttcataccttcttttgtcagttttgcacacatcttttttatattgaaggcaatggctaggaaggcaaagtccatgaagaccttgtcctttccaaaatgtcggaaacgtttgtagttcatattgtttttaatttgtccgaacacggcttccggttctatgcatctctgccctctgtgtttcagtcctttctctgagcagagcagttctttggctctccgcttgtattgtctaagcctatgattcagttctatcgtcctgtttccttttgctttaaaacagcggcatcgcaggggacagccttcacacctgacagctctgtaccgtgcattttcgctgacatatccggatgcggttttcacattcctggtgcctatcctccgcatcctttgccccataggacagatgcagaagtcatgttcttcattgtagtagaagttttcggccttgaacgggtccggtttgaatctcggccgctgctccatgtggaaatagttgtactttacgtaggcttccatgccgttttcggacatgaagcggtaattctcttcggagccatagccggaatcagcaaccaccgtatgggccatccggtcatacctgtttgaaaaagattgcaggaaaggaatcagggtcagtgtatccgtagggttcgggaagagtgcaaaatcggtgatgaactgattttcggtgccgatttgaaggttgtaaccgggcttcgtctgtccgttgcgcatggcatcctccttcattctcataaaagtagcgtccttgtccgtcttggaataggaattcctctcttgcagtgtttccagatggcagtcgtattcctgcagtttgtccctgtgttcttccagttccttcagctgtttgcgtttctttttcagttcagtcttttcctctttcgcggatggctcggaaacctgttccaatgcatgacgcaattctcctgccatttcagtcagcatggccggagtgaactcaacctcctcattgttctctgatgacttctcccgggcaatgacatcgtctatctgccctaacaggacatgtatcttcttcatcaggcgttcacggttccgctcaaccgtttttcgccagacgaaagtgtacttgttggctttggattcgatctttgtcccgtcaatgtattccacattcaggctgatgaagcctttggaagagagaagaagtacggtttgcgtaaacacctcgttgatttccttcttcacccggttgcggaaacggttgatggtaatgaaatccggtttctcatatccggccagccagatataatggatgtcacggtgaagaagcttttcaattttccggcaggagtagatgttgttcatataggcatacagaatgaccttgagcatcatcttggggtggtaagggctgcggccgcattccttatacagctttctgaaactttcaagattcaagccctcaaccagggcgtcaaccatgcgcaccggatcgttttctgcaatatcctcatcaattctttgaggaaaaagaacggtttggttgggaatgtaaggacgaaaatgtatctttgtcatagtgaaattcttatgcctaaagatacagaatctttaggtaataacaaagccccagcttgtgaaagtcggggctttgtacgtaaaataatgaaggtgtgcattttgacacaccttcatctttgtatatatcgacaagaaagaaaggagcatccagttcatactcttcgttgcgtatcacatatcttgttgcccaagcagctttaaactgctaaaggcagtacttggagaatcaatgccgacaccttgtagaaaaggaagactggaaccctcatctctacagctaagcctatcaataccttcttgtctgtttcatccattgacggctgaaatgaaacttctatgccatccgtcatggattggttgaaatggtgggaataaaatgaaagtgagtgatgagatactccagacgttccataggatattgctgaagcataatccacaataatcgtgcggcaaagtcggcagtgcctgttaccaactgcaggttcaactgaaaaacgggacgtgacaatcctttcgttactttttggacgaggctggtcttgccgaaacgtcgtggactaataaatatcaggcgattttcacttgcaagtatctctcttactcttccctattccgatactctatccgtaaagtattcaccgtctacaatggtactgaatttaaatggattattcatattgcgatttttttcaatgcgacttttttcgcaaatataagaaatatatttgggggcattctgaaagactggctaaaatgaaaaatacattataagcttctgtttttcttcattttattgtatatacttgtaagataaactctttataaataaattggaaatgagcagaaatgaaattaccttacaagagatgttctcctcagtcatcggggaactccgggaaggcggcagatgggggacagcacacatctaccaatcagcgatgaatgcattctcggcattcaccaaatggcaaccaatgcccatgcgcaagctgagcccgaccgtactgaagaggttcgaaaactacctcaggcagaggaactgcagttggaacaccgtgtccacctacatcaagacggtacgctcagtgtatcatcgggcggtggacagaaagtacatacggtatgtacccagactgttcgagcatgtgtataccggcacacgggcagacaagaagaaggcgctcaaggcatccgacatcagcagcctggtaagggagacggaaaggagcctgcaaggaggaacgctcccaaacgcacagcagagaacaaggattttcttcgtactcatgttcatgctcaggggcataccctttgtggacctggcgtacctgcacaaaagggacctgcaggggaatgtactgtcttacagaaggcggaagacgggacgggcactgaccgtgtcactcacacccgaagccatgcagatggtcaggatggtggcggacaggaaccccgactccccctatctgtttcccatcctgcagagcgaggaaggtacggaagccgcataccgggaataccagtcggcactcagggcattcaaccagcgtttggcagtactcaggcagtgtctgggaatgcagtcggcactcagcacctatgcggcgagacatacctgggccacaatggcttaccattgcgagatacaccccggaatcatatcggaagccatggggcactcctccatcacggtgacggaaacctatctgaagcctttcagcaacagaaaaattgacgaggccaatcaaagggtaatttcttttgtaagaagtggagtgtgtacggtgtaaaagacgttacttcttttgataggatagaatagatttgtcgcacattttccggaatcttcaaacagagttttgaggaacggaatggtgttgtctttacggagctcacatcggttctatcaatatgctgttattcaaccttttgagctgaaaatatacacttccattttttgaaggcctcatttcattactttcccattgtcacttttctggacttccaatcctctttccaatatcccaacgaacagatttttactattccaaacaaaaccggtctattttctccttattccctgattattaatgaaattaacaagatttcattacctgcgaagtaacggaaaatcatataacaaaacggatataggaatggaatataaaatgagagattattcacttttttattttttaaatttataaatttaaagttttcaattatgaacaagaagtttctaagtgtgatcctgttcagtgccttaatggttggtactgcaggaacgtttacgtcttgtaaggactacgatgatgacatcaacaacttgcaggaacaaatcgacggtcaaaatggtctgagtgccaagattactgctgtagagagctcaatcagcaatttgcagtctgcacaaagtggtttgcagagtgaaatcgctgctgcaaaagacgaggcttcaaaggctgcccttgcagcacaagaagctgctattgctgcagcaaaggctgaattggaaaaagtcaaagccgagttgcaagaggccgacaaagccggtatagcagcaatagaagaaaaactggctgaaatttcaggtagaatccagactttggaacagttcaaaactactactgaagcaacattggaaaaattggcagcagcagatgtagctttgcagagcagcatcactaccttgaaagctgatgtcgctgccaatgcagaacagattggtaagaacaaagctgccattgaagcacaaattgccgctttggatgaatataaaggaaccaacgatgctgccattgctgctttaaaagctgatttggaaaaattgcaagctggcgagctgacagaagaaatggctgcaaaaattgcagcacaagtaacagaagttgtaggcgctaaattagacttgatttctgctgcattcagtaaagctgttactcatgtagaattgttgaattattcattcggcagcaaaactgacaatattattgaaggtgagccttctataatggatttgcgtactgctgaagctgtagaagaccgtgtgtttggtaaaggcagctccgacgaagtagaggcaaattcttatgaaatcattaatcaaaaggagttcaaaaaaggtgaaagagcattcatcagcgactctgtattgattcgtgtgtcaccggctaatgccaccttgaccgaaggacagatttcatttgtcaattctgcactgggcaatctagatgaactggtgactgttgagaaagtggagcagtttaaaggcacagtaaccaccagaggtgtatcttctaatggtctgtggaaagtcgtattcaagttgaacaaggataactatacagaagagaatttgctgaaagctgcaaagtttgactataagagcggcaacgctgaagacgaaccggtgaagaaactgaaggatattctctacgcagtagcagtaacagacaaaccgggcgacgtggaacgtagtgtgacaaccggttatgaattgacactgggttctgtatatacaccgcagtatgaactgaatttcaaggtcaacgacaaggatgtgaatgatctgcgtaaccgtttccagtatgctgaagatggaactttaactgctgatgcaagcaaaaagctgttctatgactataaatggaatgttgatagaaacggaaaccgtatagaggaaaacggctcttatgtatctattgatgctactactaaatatggcacatggagagaccaagacctttggaggggtggcgataaccgtgacaaagaaggttctagcaaatctttcttctctacaaaagtgggtgaaaagtttaccgtagaattgagttatagtgatgaggatatcagtggtatctatggtttctatgtagtgctcgacgcgcaacgtgccgtagaaagtgctccgtctgaaatcacggcatggaactcttatgaggcagatatcgaaggactgaatacaattacgacaaaccgtaagattgaaatgtctatcaatgcagagaaggctgatggtgacattatcggtttccgcgtatatgcagtaaataataacggttctttggttgacccggacggtaaggcattctatgtagcagtaggcgacatcgatgctatgactactacgttgaaggctgattacgtaccggtatggaatgctcctgatggtgattacgaacgtgatgttgagattgatttggacgaagaacttctgaaactgtttgaagataaatataatgaatatgaggaaggtaatttgatatttgacatagagaataatccgaatgacaatgaaaatttcgtcaaaaacttcgacagacaggaaggcaagttagttatttcattgaagggtaatttgaataagttcaaggataatggtacttataagatgtatttcaactttaccgatagtaagaagaatgtaatagttaagaaagttgccattgaaataaccaagaagatgccagaattccctgctgcattctctgctaaggccaaccaacttgacaaagaaggcgcaaaggttgttgaagtaacagaagctaactggaatactactatccataatctgggtacagcattcaatggcgtttctgatcctaccaacgcaatcatcgacttcaactatacattcacttgcgcagaaaagcagattgtattctactctgataaggcaagtgctgctagatatggattctatctcgatgtaaacaatgacaaggataaagcagcagctctgtttgcagataaaccagaaggaaagatgtacgatgtaaccgtatcctataagtacagcaatgtttcatcagaaacggcagactactcttacactgtaaaagccccggctgcccagaacttcaaactgagacttgtatgtggtgaaggtttcacttctgaatggaagaactttgatgacaagaagaatccaattaaggaatccttaatctataacgtttctgaaacaagaattgctcttgctaatattctgaagttcaagaaaggtgatatagattacacgcctacttttgttgctgcaaatatcaaagaatgccacttggcttctaacaatgtggatgacgaatactttactgtaacatttgatgcggttactcaagaatttgtatttgtttcaagattgggacaaaatccaccgacttctgatgttattgcgaccttgaagttcacaatggtagacttcttcggacacgaaaatcctgaggaatatccatacttcgttattaagaaataattttttcattcttagtaattgatgaaagagaagcctaactgaaaaaataagcttccgtactttatgagggtaggagaaaacaaaattgttttctcctacttttttctccctactttgcttccacacttccacccacctcctgcatccccctgtccatcggcatttaccccgctgtggaagtaactcccaaaagtggaagcaaaatttgcttccacctattcaagacaccatagttttaccataactaactcattcttattttaatacatcgaacaaagtttataaaacacttgcaccagtttccccatacttctacacccatcctacccataaaatctgcaatacccatatccccccttatcttcatcccaaatccacaacagcctcctccccctcctcagcataaaaaatgcccccgttcatttcattctccctccactttccactatctttgtccccgcgatgaaaaagtttgccgacgtcatattgcctttgcctttgcacagctgcttcacctactccctgcccgacgagtgggcggatgaagtgcagaccggttgccgggtggtagtgccattcggacggaagaaatactatacagccatcgtgcgcaacgtgcactattgtgcccccaccgaatacgaagtaaaggaagtgtccgccttgctggatgcccgccccatactgctcccgcggcagttcaagttctgggaatggctctccgactactacctctgcacacaaggagacgtctacaaagccgccctaccctccggcctgaagctggaaagcgaaacaatcgtagagtacaaccccgatttcgagtccgacgtccgcctgccggagaaggaacagaagatactggatatgctctctgccgacccggagcaatgcgtgacgaaactggagaaagagaccggcatcaagaacatactttctgtcatcaagtcactgctcgacaaagaggccatcttcgtaaaggaagaattgcgccgtacctataagcctaagaccgaaaaccgagtgcgccttaccactgccgcccgcaacgaacaccgcctgcacatcttcttcgacgagttgcagcgccgtgcccccaagcaactggacctgctgatgaagtacctggaactctccggctacctcagcggacgagatataaaagaagtctccaaagccgaactgctgcaacgcacctccgccacccctgccgtattcaacggtcttgtggaccgtggtgtattcgaagtctaccagcaggaaataggccgcatagacaaaacactcctcaaagaagtcatccccgtcaacccgctgaacgagcaccagcaacgcgcttatcactccatcttagagaattttcaaagcaagaacgtctgcctgctgcatggcgtcacggcaagcggcaagaccgaagtctatattcatctgatagaagaaaccatccggcaaggaaagcaagtgctctatctcctgcccgaaatagctctcactgcacaaatcacagagcgcctgcaacgcgtattcggctcccgactgggcatctatcactccaagttccccgatgccgaacgggtggaaatctggcagaagcagctgtcggaagcagactatgacattattctcggcgtccgctcctccgtcttccttcctttccgcaacctcggtctcgtgattgtggacgaggagcacgaaaacacctacaagcagcaagaccccgcccctcgctatcatgctcgcaatgcagccattgtactcgcctccatgtacggcgccaaaactctgttgggtacggcaaccccttctgtagagacttggcacaatgccacattcggtaagtatggcctcgtggaactgaaagaacgctataaagagatacaactgccggagattatccccgtagacattaaggagctgcaccgcaagaagatgatgaaaggtccgttctctccattgctcctgcaatacatccgcgaagcgctggaacagaaagaacaagtcatcctcttccagaaccgccgcggcttcgcccccatgatagagtgcaacacctgcggctgggtacccaagtgcaagaactgcgacgtcagcctcacctaccacaaggggctgaaccaactgacctgccactactgtggctacacctaccaactgccccgcatctgccccgcctgcgagggcactgacctgcgcaaccgcggcttcggcacggagaaaatagaagatgacatcaaagcccttttccccgacgctcgagtagcccgtatggatttggacaccacccgcacccgtaccgcttacgagcgcatcatctccgatttccagcaaggcaagacggacatcctgataggcacacaaatggtgtccaagggtctggacttcgaccacgtcagcattgtgggcatactcaatgccgacaccatgctgaactatcccgacttccgcgcctacgagcgcgccttccagctgatggcgcaggttgccggacgcgccggacggaagaacaagcgcggcagggtggtgctacaaaccaaaagcatcgaccatcccatcatcccgcaagtcattgccaacgactacgaagccatggtaggcgggcagcttgccgaacgccagatgttccactacccgccctactaccgcctggtgtatgtctacctgaagaaccggaacgagaccctgctcgacctcatggcacagactatggccgccaagctccgcaccgtctttggcaaccgggtactgggaccggacaagccgcccgtagcacgcgtacagaccctgttcatccgaaagattgtcttgaagatagaaaccaatgccccgatggcccgtgcccgcgaactgctcgtccaggtgcaaaaggagatggtagcggaagaccgcttcaagtcgctgatagtgtattatgatgtagacccgatgtaaataactcgtaactatagaaatatgaagaagatacttttcgtttgccttggcaacatttgccgttcctcctcggcagagggagtcatgaagcatctggtagaagaagccggacgtgcggatgagtttttaatcgattctgcaggcattctgtcttatcaccagggcgaactgccggacagccggatgcgtgcccatgctgcccgccgtggatacaatctgacgcatctttcgcgccccgtacgtaccgaggatttttacaacttcgacctgattatcggtatggacgaccgcaacatcgacgacctgaaagaccgcgccccttcaaccgccgaatggagcaagatacaccgcatgacggaatactgtacaaagtttacccatgtcgaccatgtaccggacccctactacggcggttccgaaggttttgagtatgtgctggacattctggaggatgcttgtgccgggttactgcagagcatttaatccagcggcattacatgatacagtgtcccctgccgtgacttcttgttcggtatttcaagcttcttgagcgtccgcccgaatacggcaaccttgttgattgccagacggtcccgcgtctttgtctgcaaggcggaaagaatctgcatgggcatcatccattgcccctcctcatcctcttctgccgcacggaaatggctgtggaagagttgttccagtggggtgagctgttcaaattcccggttcgtccgcttcaagatggcttcatcggcatcatccagccagtagcgctcacctttggctacggcattcagagcttgtgcatagagctggcggtagttgatggtgacattcgtatcaatggggccggtgacctcaatgcagatgaaacggcggctgccactggggtctgacaacaagtccttctggttgctggtgccgatgaaggaggcataccgccgcatctcccggatggtgctgccgtagggtttgcgcaggttggcaaccggtttctgcagcagatgcttcagaaagccctgctggttgatgttgatttgatcgaactcgtcaatgttgacgagcagaaagcgtcccagactgcgttctgcttcctgcctgctcttgaagtcgatgctgtccgtatagccgaaacgcagctccggtggcagcaaaatgcggcaaaaggtggatttccggaacccttgagaaccgacaagcagaggagaagtattgtttccgtgttgccggtccattccacgccagtgtgccaccatgcccaggaaccagcggtagaacagctcccgccaatgaggattgtggcacgggacgaggtcggccaatgcccggatgcggtctttcccatcccagcggccggtgtcgtaaaggtattcttcgacgggattatagagtggcacgtagtctgaagtaaggaaacggttgatgtcgcggtcccatacgcggataccctccttcagggcattcatggagaccgtactgcgggcacgctggtcagcaggcttgaaatagaaatggacggagtcgcgctgacggtattccaaatcatccagaacggtgttgtagcggaactcataccggcggcccataaactcttccagccggaaaacgctctcctgctcttgcgtcagactgctctttttcccgaagcctttaagctcttgatataggttatgaatcgtttgacgaacaatgaattcatccgcttcccggtaatagtgcatcaatgtctggcggactacttcctcttcggggatgcctgccttgaaacaatgttcggccagaggcaccagcagtatccgtaaatcctcgtcccgtttccagccgtccaattcgcgaaatgcacggtcaagggccgattcgaagagtatggcgaaggtgtccgaggctttactgtccggatgcagccgcaacagcgggttcttttctgcgagttttcgttgccggaagttctcttcctcgggcatgccgaggggttgttccaagcagaaaggcacagcggcaggattgtagtaaggatatccatccagagtcatgcggcaactctgtgtaagggaaggttctttcaatgtaatggcaaacggcagtaagggctggtagcacttcaccgccatacggtaggcgtgggcatgaaacaaggcggcatcgctctcccacttcggcgtcgtgccgtcgggcagggcaaacaatacccatatcttggcactccgtccgctggaaccgcagaaagcggcaaaggtctgtggcagcagggcggcttgttgctttacatattccgcttcggcaatgcccgacagacggtttacttccagttgtacgagtccgttatagttcttcatccgccgttctccctcttgcgtacggctatattccacggcagggtagatgcgtggcagtttgtctatatgttcgtattgggcgcaagtaccctccagttgaggaaggatggcccggagggtcgatacatgtccggctttgatttcggttttcagttttttaatcagtgcatccgcttccagggtgctgagggcttcctttccgctctctttttctgctctaatcaaggtaattttcattctgtttgtcagcttgtttaagtaaatataattctcgtaaagatactatatcagaaggcggaaaacaagtattcagtagaataattattaaataaatccctgcttccacaaactatacagcgtggtatcggaaacctttggatttcttttttaaaacataggcattcctttgtttttctccctttgtttgtctacttttgtatagggaatagatgacgcctaacgaccataaacagctctgcttacggccatgaagcaatcgcttgacgaccgtaagcagagctgtttatggtcgttaggcgtttctatccccaaagcttttacggatgaagtacgtaacccgcacctattccgcatagggcgcgaacgtattgtacaacaacttaaaagacattgaactatggcaattttattcgattggtatgagctcccggaacctaaagacaaacagcgggaagaaaagatacttcatccgcgcatccgcttgaacggctctaccagtactgccgaactgagacgtcggattcaggaacgctgttcgttgacgaagactgatgtttcggcggtgctggatgccttgtcgcacgtcatgggggaagaccttgccgaggggcggcaggtgcatctggacggtatcggctatttccatcccgtactgactagcacggagccggtgaccgctgcgaccaaacgtaaaaccaccaagattaagctgaagggcatcaagtttcgtgccgaccaggtactgaagaatgagataggcgctatcaaagctaaaccactggggctgaatgagcattcccaaaaactgagtgacaaggagattgacaggcggctgacgagctacttctctacgcatcagttccttacgcgcagtgattttcagagcctctgcggaatgatgcgctctacggcacagcttcatattcgcctgcttcgcagcgaaggcaaactcgagaatgcaggaaaactgaaccaaccgatttatgtaccttgcacggggtattatggtagagacgagtaggttacggtaaaacaatagcgttttgagtaggtggaagcaaaatttgcttccacctttttttgttgcttccacagcagctcaaatgccgatggatagggggatgcaggaggtgggtggaagtgtggaagcaaagtgatggaaaataaatttcagagtggatttgttaaaatcaaaataggaggaaaacgttttattgttttcctcctattcatattgtatcaaggacttctcagattaagagaagtaacttgtttcggcttatttcagtactacaggtacattgacagtcttagtcttaccccattcatcaacaacacttactacgatgttgcaagtcagtgtagtagcaggagcagtaacatcggcaatcggagtgagtgtaatctcatttgtgaaattagctgcacttatgttcaaatacttcttagctgtgtcatccaaagctatagaaacattatctacaccagctttagtaaatttgtcagcttcgctatttccgaaatattctacattagtcttagtaacaccacggatttcatctcccttcaaagttatttttgcttcttcgtcagcaactgaaatttctttaggagtacctgccacatacttcttggcttttgtatcatacttcacataatcaagtgtaccttcgaatacagcagacttgatggtcaaggtaaattcatattttacagttgtcaagtaagtattaccatacggagtgtaaatagccttcaatgaacgaggttcgtaagcaccaccgaagttaccagtcttatcgtcggttttagcagccaccttatctacaatgatgtcaccggagttggcagcttcagcatcaacaatccacttattagcagtccatttaacaccgtctttttcatactctgcaggaactgtttctgagaatgtaacatttgtccagtcttctacaccaaacagccccttcaagttgtaattgatcttatcatcaacaggagtaccataagctacagcagcgttaccattgaagtacagaggcagcggtttgaaatcataagaagtagcatcttcttttacaatcaaagtcagcttaactgtattcttcgggcttgaaccataagttacttcggcttcgtaggttccagggaccacctttgtattatctactgagtaagtcaaagtgtgcttgtaataaccgtttggtttttccgtagcattgccagatacaattttgcccgttgttgttatagcttccgcttcagtaccctttgcaaataccactgtaccattagcatccttgacatctacagtaaatttggcattaccaacctcaatcttataagagctaagatcagtagtagtattatcaaacaagctagttaaatcgaataccaatacattcttactattatcggctttcaataccaattcttgagtaaaggcattttcaatagcaggattgataaacttaacggaaatcttcttagtagcagtagggtcaactttacctgtagcagtcaaatacttaacactcactacaactgtcttaccagcaacttcgcccttaatattagttcctgtaatcttagccttagcagcatcagcagcggctgtctggtctgtatcgatgaaatatttcacatcaatgacattctccatatcaacgcaggcactcaagtcaaaatcttgattgatttctgcttctactgttgcttttttaactgtcaaactagaggcaccagcctttgttgcagtagccgttacatcataagcagacagtacttcgttgtcataagcatcttttgttgcaatagcaaaagcttgccccttaaccttatcaatttgctcagtagtaacaccagctgcaaaagaaatagccatattatagatacccttattggctgtagcagctcttgacaaaggtttttctgtcatattgggaacagctgcgttcaaattaaagatagagaatcctttagagtcaaccaattggaatttataaaccgttgcatctgcaattgttggatttacttgagcgttaagtacgccattagcttctttagtaggcaacaagatgtcacctttagcaaacggagtaccatcaaagtattcacctttatctgcagctacaccgtataccaaattaacagttgcaccttcagcaattgtagcattatcatctgcttctgttacagtaacagctttaatgctggaaatagcagcagctctcggcaatacgatatcttcgtaaacaccttctttattcgggatatggatagtcaacttagcaccatcttctacatagtagataccacctgtagaaacacccaagtcttgcttctcgccatccttgccatattgtacatagatgtggccgtcttctcctacagagaaaatcggagtctcagcagcatcacctgcttcacccttcaagtcttccagtgaaataaggtcaatccaagtagtgccattgtcatagcttacttggattttgtcattgttcactgcaattttcggagtcacaccgtctttacctgcttcaccattggtaatagtgtagctggttccattacccaaagtaacaacaataccattgtcagtagatgtcacgccggacacccattcgccgcttttgatttgactctctaaagcagcaatagcatctttgttagaggtaatctgttcttgtaagttgtcgatgtcatcatcatagtccttacaagacgtgaaagttcctgcagtaccaaccattaaggcactgaacaggatcacacttagaaacttcttgttcataattgaaaactttaaatttataaatttaaaaaataaaaaagtgaataatctctcattttcattccctttcacatagctgttgattacatgattttttccgttacttcgcaggtaatgaaatcttgttaatttcattaataatcagggaataaggagggaataggctgattttgttcagaatagtaaaaatcagtccgttaggatattggaaagataatatatagtcttaatccccaacatcatagaaaagctacaatagaaattatgaagtgaaaaagtgcctaattttcaatcaaagcttctatctttcagtttattgcttacgttgggaatttttttgtaaagtcgatatcaatccgttcctcaaaactttgtttgaagattataaaaaagaaacaacaagtttgctctacttcctcaaaagaagtaatctcttttatactggatatccttcgttttttacaaaagaaattaccttctgattggcttcgtcaatctttctgttgctgaaaggcttcagataggtttccgtcactgtgatggaggagtgccccatggcttctgatatgattccgggatgtatctcgcagtggtaagccatggtggcccaagtatgtctcgcggcataactactgagtgccgactgcattcccagacactgcctgagcactgccaaacgttggttgaatgccctgagtgccgactggtattcccggtatgccgcttctgtgccttcctcactttgtaatatggggaataaataaggagagtccttgtccttgtttgctattattctcaccatctgcatggcttcgggtgtgagtgacacggttagtgcccgtcccgtcttcctgcgcctataagacaaggtgtttccttgtaagtcccttttgtgcagatacgctaggtctacaaaaggaatccctcttagcataaacatcaatacaaagaaaatttttgttttctgtcgggtgttgggagaattaccggcctgcaggttcatctctgtctctcgcaccaaagagcctatgtcggaagcttcgagcgctttcttcctatctgtccgtgtaccggtatacacatgttcaaacagtctgggtacatatcgcaccagttttctgtccactgtccggttgtaaaccgagcgtattgctttaatataggtggacaccgtattccaactacaattcctctgcctgaggaagttttcgaatctcttcagtacggtcgggctcagcttgcgcatgggcaccggttgccatttggcgaataccgagaatgcattcaccgttgactggtagatgtgtgctgttccccacctgccgctttcccggagttccccaatgactgaggagaacatctcttgtaaggtaatttcatttctgctcatttctaaattatttataaatggtttgccctgcaattacaaataaattgaatgaatataagattcaagaaagaaaccattaaagcttgtttctttgcaaccaaagttggaagaactgatcatatacctggtaaatacctttatcatacgtaataaagtctttttctagcagtccttttacagctgaagagacagaacttgcagattgcaacttgtatttacgtacaaagccaccacttgagatagccttagcttttccctctgctgctattgccataaatacaatacgctgtttttcgggcatctgatataataaggcatcataggtgtcggcagaaaagtctagaaggtcgttaatggcagtatctatcattgagggaatacatatttctccagttccggtcatggaaaataaaatgttcataaccttctgcatatacgaagttataccattgaagcgttcatataactctgttactaccaatgtatctaagagtttgcttgcccgctcaaagtgcttaaggcagaactccgcgtatttatcaacagaaatgggaggcaggtttatcaatgtaactgattgatagaatggacgtgtcggagaagtaaacattgcccccatcagatgcctatgggacccggagaagacaaagtgggcattggaacagcgttgtatatgtgtccgtaatgccgcttctatgttgggatcgtctgcatatttggttatttgctggaattcatcgatggcgattaggcatggttttccggcattgttcagataggagaatatctcatccaatgttgcagagggattggttatagctcccagaccgattccccacgtaggctgcccattcatgtcgaatgttatttcggagcgaagagaggccaggacattcaggaaggtactccatacggatttaccttttggacgtaattcatccagtacagccttgccgaaaacattcacaaaatcgcgtacagagcttgtggcatagatgtcgatgataaaagtgtgataatgctccttgatttccggctgtccaaaacaatgccgcaacaagtctgttttgcctaatctgcgtggggaaatcaaggctatgttattctcattcgtcaaaagtgagacgattttagccgtttctttctctctgtcacagaaatattctggtgacacatagccgttcgtaacaaatggatttttcatatgattattgagtttacacgcaaatatatagaaaatatcacaataatcattagatgataatcataaaatgattattaatagaagtgtgtggttaactatcatatgaaatggctattcttttcctcatccaaagaatagaggaatagcaatagccattttctgttttaatcttgatattcaatttcttcaccaagaacttgacgtatcatattatgttcattgcgatagagtttaccattacgcagataataatagttaaagtaaccggcaaactcaatagtggcatactttagtgtgtctccttgattataggctctccatgtaccctcgtaagagctggaatcatcatattgaatcaaggtggtggagtcggatcgaaggttgaattggataccggtttcagtgatgaatttgcctggaaaaggatgtgtagctgctgacttcttacatgaagaaaagcagatgagtgaaactgacacggtcaaaatgaatagtattttcttcatatctgatatttataaatgaaagattgaaaaaaaggacgtcctgcaaggagggcactgaaaaaggctctctaaaggcaataaaatgaaaggttcgccaagtccatataattggatttggcgaacttatttttctacttttgaatctaagaatttagcggttacttgccctgtaaagcttaaaaacggccaattaagggctttttagagaacgaaaaggctctcccctcatctgagtttgaggattctcttgatatttgctacaaagataaccatagccccttgcatacgcatacattctattccgtatgaccatgctcggtcataccctaatacattttttaattcggagttcttggcctctatcttatatctcacttttgctttactcctgaactcttccgatttctcaaacgcctcatgctgctgatgctctgatgattttatttgaacagaatatgttttagattttgcgccttctttgtagcatccctctcgccttgaacataacttgcatttatctacatcaaagaaatagaccattgactgattcgttccctgtcctttctttccttgtacagcgcgcctaattgccatatggccagccgggcaaacaaacatgccagcgtctttattgaaatcaaatttatcctcatccttacggaatccattgcttatggctggatttaatcttgcaactagctcaaaaccattctcttcattgttcgataatatgatgttgtctttacctgaataagctgtgtctccaacgactgtttccaccgtcattccgttggcacggctctggtttaccagctcttcaagttgtgggccatcacccttctctcccgaagtcactgtggcggcagtgattatacgctcatcgctcatggcaatatgtgtcttgtagccgaaaaacgagtcatcctcgctcttgtgacccacccgtgcatcttcatcttttgatgtcatataatggtcttcaatatcggcaagtacctccttgagcatattcagccgctctttgaccttgggtatctctgccaatgagggatttgagctaactacatcaagcaatgcctttgtatagtcaagctcatgctcaatgttgtcatccgtgttcttcgaaggcagattgctcttttcggtctcgtcggcatcatatatgcttttgcgcaattgcttcgagcgcaatcttagactctccaagggtgaccaaggattgctgcgtgagccggtatgggtggcatcaactataatcgtgcgagactttattatgcccttttctatagctatgccaacagtcttgccaatcagcaaatccagtagatctttatcttttagacgcaacttgcgaaacttgcataatgagctcggattaatcaaatctgtttcctccggactcatcccaagaaagtatttgaaagacatatcatatcttgatcgttccacaacatcgacatcggatatgtcatagattgttttcaacagaagatatttgaacatccggatgggacattcggccatccttccattgtcttgacaatacttgtcaacgagttcttttttaataaaagaaaagtctatcaaatcatttatctgacgcaataggttgttacgaggaataatcaaatcgtatagatccgaataattactgaactgtatagtctgttgtagtggtagcatatctgtctgattactaccataaagttacaaaaaaatcggcacatactcaagcttttgcctgaatatgtgccgatttttttaggacgctactatatgggggactttttcagtgccctccctgcaagaggacgtcccttttattaaattatatcaagaatctcttcttaattatttggcactcggtgtaccggcagccttcttaacgatgactttcaggttatccttgctcaatacaccccacttgtagttgacatttactgtcaagaacatattgtagtcaacgttaaccggtgtaccatggttgttgaagtatgccaagtgagtcgggtcagcatcgaccggtttagctgttgacttgtctgtagactcatcccaattcatcatcttcaatgaagcattggtcggcaatttaccgtcagtagtaccctccttgtgctcataagtgttggttgcagcattccaagccaagctggtagtggtcttatcagtcaagaacttgacctcacgtacggcatagtagtcatacaaagcatgtgcataaacttcatcaccagtggccttgtcagctacagcagcagctaccggtttattattccagtcagtgaatgtgaagttcttggcaacgctcaagaagctaccgtcaatttcagcatcaacgaagttgtcgctgatagaaccgtcaatagtcaacgggttgatgaagtgtacctcaaattcttgaactggaataacattgaactcattgtatgcaacaactagctgtacaggaacttccttgccaatcaacttgagggcggcatcagtaccgttcaagtcatctttttcgtggagacggatgatactggagcattcatttacgctattacctaatttttcatcataattccaaggcaagttctttttgttttctgtagcatcagcacccatcaggttattgatagtggcagccaaatcgttagattgtttataatcattaattcctgcatccgttctaccgatgttgctgttgtcacttacgacttcgtcttttgctgtacctttagtcttataccacaattgagtttggtcatcgcttgtgacaaagtctttcaaatgcggataagtagtcaggtctttcatacgtgtttcgtcaaagataaacttaacctctgcacactcacgaatatactggatgaattgggccaagttggctggtttttctttggtcggttcatatacaaagccattaaccaagtcagcttcgatgtggctatagtctttcagctcacaaccgtcaggagtacccggatatacatgcgggtctttctgtgttccaccgtcatttgcagtagtgtaaacaatcggattcacattgaagacaccttcgcccttaccattcttccagaaagtaccttggtatgcaaacttctgtgcaggaacaacaattgtctgcttgaatgtctgcttgatgtcaccattcaaaccagttccgtcaacgtacttaacatcaatttcaaatgtagaagcataagtcttgtttgctgcattgtaagccaatgtaccaacagtcttcggattcatagcccaaaccaagttgaaagaagtattgtcttcagcatcctgcaagaaaccgaatacaagatctctagtattcttgatggcttcaccaccgtctttgccaactttatttgctccttcttcccagtcactcaaagcatctgtagattctgtcaatgtgctgagttcaatcttcttaccatcttttctaagttcaaggatttcgatgcccttgtagatgctatggaactgagtcttactcatactctgtccaccatcgaacttaaccatgtggtaaatcttctcattcatttccttagagaacagctgctggaacatgtcatgacaagttacagtgtcgttcgggaatgtgatggcagcaatagtctgatccttttcaccagtccaacgaatcttgatgtaacgaactgcaatcatgttaccgttattcttatcccacaactcagcgcgaatgataggctcacgaccgatagaagtcttagaatattcgttgtctcccaactctacgtcataaacttcagacttcagagtgtaaccatcagacaagatacggccgaattcctgctcgtctgtcttgcggtcaccctgcagatacttggcttttgccaaagcaaaacggaactccagaccatagtcggggtagttgctcaattccttgtggctaccatgttcgtcttctgcataagtatagcatactgttaccaatgttctcaaatcaagcggttcgtcatatgcttgtttaacatcaaccaatacatcattacctgatttgtacaagcagatagagtcatgatagtgtacatacttaccatcttgtgtttcatcagcaaagttaccagtgatagctttgttaaagtcaatcttcttgttagccagataagggaatactgtagattcttcgatacggctgtattcagaacttacatatacttcttcaccagccttcttttcgtcatcagtcaggttcttgtcagcaataggagctttcaaggaagccatccagaatgtctcaagcttatctgctccgtgtgcttcacctgatgtaccgatattttcgttcagatattctttattcttcttatattgtactgtcaaaacaccgccatcaacagtataatcaacaacttcgagaggggcattctccagaatttccggagtagacttagttacattttgagatttgataccttcgaacaacggaagtttaatatcatctttcaacacaccgatgcttggactcatcttatagcttacctcattcttttctgtagaaatattaagagttttggcattagctacagctttatggtctaccataggcgtacggggatgatttcccggtaccacatcattctgatgatctgttacagcggcataaacctgcggagtatactgcaatgacagtaattcaatagaagggataccattgatgtgtgtagtcggaatcagtgtgaggcttgtcaaacgatgaccaatcaaggtcatcacttctacgctcaatttttcaaccttagttgcgagttccttcaaatctgcatcggagatgaaatctttctgtaattctgccttcagatctgcaatctttttgtctacagcatccagagaagccaacttgtcgatttgcttctgtagagctgcatcagcatcctccaaagctttcttcaaggctgcaatgtcttcagaagaagccccaccttgtcctgctttgtccaatgcttctttagctttgtccagtgcttcttgtgctgctgttttagcattagaagcttcagttttggcttcagcgatagaagtctccaaagtacttactttagagttcaattcatcaagtgaagctttcttgtccagttgtccctgcaagtccttgatgtcgtcatcatagtccttacaagacgtgaacgttcctgcagtgccaaccattaaggcgctgaacaggatcacacttagaaactttttgttcataattgaaaactttaaatttataaatttaaaaaataaaaagtgaataatctctcattttcattccctttcacatagctgttgattacatgattttttccgttacttcgcaggtaatgaaatcttgttaatttcgttaataatcagggaataaggagggaataggctgattttgttcagaatagtaaaaatcagtccgttaggatattggaaagataatatatagtcttaatccccaacatcatagaaaagctacaatagaaattatgaagtgaaaaagtgcctaattttcaatcaaagcttctatctttcagtttattgcttacgttgggaatttttttgtaaagtcgatatcaatccgttcctcaaaactttgtttgaagattataaaaaagaaacaacaagtttgctctacttcctcaaaagaagtaatctcttttatactggatatccttcgttttttacaaaagaaattaccttctgattggcttcgtcaatctttctgttgctgaaaggcttcagataggtttccgtcactgtgatggaggagtgccccatggcttctgatatgattccgggatgtatctcgcagtggtaagccatggtggcccaagtatgtctcgcggcataactactgagtgccgactgcattcccagacactgcctgagcactgccaaacgttggttgaatgccctgagtgccgactggtattcccggtatgccgcttctgtgccttcctcactttgtaatatggggaataaataaggagagtccttgtccttgtttgctattattctcaccatctgcatggcttcgggtgtgagtgacacggttagtgcccgtcccgtcttcctgcgcctataagacaaggtgtttccttgtaagtcccttttgtgcagatacgctaggtctacaaaaggaatccctcttagcataaacatcaatacaaagaaaatttttgttttctgtcgggtgttgggagaattaccggcctgcaggttcatctctgtctctcgcaccaaagagcctatgtcggaagcttcgagcgctttcttcctatctgtccgtgtaccggtatatacatgttcaaacagtctgggtacatatcgcaccagttttctgtccactgtccggttgtaaaccgagcgtattgctttaatataggtggacaccgtgttccaactacaattcctctgtctgaggtagttttcgaatctcttcagtacggtcgggctcagcttgcgcatgggcatcggttgccatttggcgaataccgagaatacattcaccgttgactggtagatgtgtgctgttccccacctgccgctttcccggagttccccaatgactgaggagaacatctcttgtaaggtaatttcatttctgctcattttcaaattatttataaaaaggtttatcctgcaattataaataaattgagagcaagtgcaaaggcatcattctgaaatctgcgaaacgggaatgatgccgtatccggcagcttatttgttggctaacgtctgtttagtggctgatatacgtatcctggaagaaccgtttgttgtcgtttaggctgcaagtggcatccactccggcttgttgcaggcgttcggtaatctcattcagctttttcctcgaaacccttccggtataaaacagacgatagcggtaatcgttgtccaacaattccatgacgtgcgtgaaattctgttcgcgggcaaagtcgaagtttacttttcttaggttttggtacggatagcggatgttcctgcctacgctgtgtatgatgaggccgtcattgtccagcgtcaggtaacagaagcgggtcatcagcatgctgatgaaaaaaagacttaatgcaaacgaaatgatagccgggatgaagccccaccatacgttgccactgacggaataatatcccaagataagggacactaggaataagacaaagaaccagaacatatagagtgacgggcgctggtatgtttctgtgggaatctttgcggctgtccgttccctcggtgcgtagttgtcgaaggggatttcttgggagactaggtagcggatgaccgaggaagggtgacggaaaggaggcagatagattgctttttctttcccttcctttagatgtaaagtcagtatgcccggaccgtatttgtcttttgcagccaggttgcttttgcggggaacctggtggtaacgcttcatgaaactgaaactcttgatttggtgcagtccgatgtgctggctttgcagcagttgttcggctcttttctgttctttactggtcacttccatagttcttattttttaagttcgggataactgatgcgggtatggtatatagtcttcagcttctccttgaatacgttcttcacggtggcgatatccttgaaggtgatggggcattccttgaaatagccttctgccacttgcgaatcgataatcttgtctaccaggttgctgatgctctcttccgtatattcgggcagactgcgtgaagcggcttccaccgaatcggccatcatcaggatagcctgctctttggtgaacgggttgggaccggggtaagtgaatgcctcctcgttgggggcttcaccggggtgttcgtttttccaggagatatagaaatacttcgtttttccacgaccatggtgagtggtgatgaaatccttgattactttggggagattgttcttctcggccagcttcagcccgtccgtcacatggctgatgacgacttgggcactttgctcatagcccagattcttgtgcggattgactccgcccgactgattctcggtgaagaacaccggattctccatcttgccgatgtcatgatacagcgctccggtacgtaccagctggcttttggctccgatgcggttggccgcttctgccgcaaggttggcaacctgcatggaatgctggaaggtgccgggaactgtctcggacatgcggcgcagcaggctgttattgatgttggacaattcgaccagggtgacattggaggtaaagccgaacgtcttttccaccaggaagagcaggggataggtgaacagcagcaacactccgttgatgacgaaataggtgtacatgcttccgttgatttttgtcaagtcgttttctgtaatcagctcaaaagcaaagtagacggcagcgtaggtcaatatgacgaggaaggctgttcggaacagttgcgaccgttgtgaaagctccctcagactgaagatggcaaccagtcccgccgagagttgcagaagaatgaattcatgcggatagcgcaggcagatggagcatatcagtatggtggtgacttgtgcgatgaaggccgtgcgtgagtcgaggaacacccggatgatgaccggcagcatggcatacgggatgatatagacattgaatatgttgttggcaaccatgatggccgtcaccacgcaatagaacatgatgagggcgaagagcagggagaggctgcccttgcgcttgtagtaatctttacggaacaagtcgaggtagagcatgaaacacagcatgaagatactggcaaacagtacctgccccgccagcatcaaccgtttttgcccgatggactcactgcgtttgatggattctttccgtagactttcaaggatgttgtatgtctcctggctgacaatctcgccgcggtcgatgattttctgtccgctcagtacgatgccgttggcccatgaatagttgtcgagcatctccttcttggcggtctctgtccgctgctcgtcataggttagattaggaaacagatattcgttcagcgagcattgccgtagaatgtccgggcggtagtgggcggtatcggccgtgagtatatagttataggcatccttcaccgaatataccttgttgatgtcctgctggttggccagtttgtcgttaatgaccatgatggcggttgtgctgtccttatgcagttggttcaactcttcggtggaaacgatgccggcgcgatatacttcagagagtttcctttccagaaagcggacgtagtcggtggaggggagcaggccgcgcaggtgggtctgatagtctgccttcaacttggcgagcacacttttctcaatgcttttgtccagctggaaatacggctggaaggcggcgaggatactgtcctgctcgcgtttcaccacttcgtcggccttatagatggggaagtcgaaggtggccatgagctgtccgtacttccagggcttgtcaatgtcgaactggtagttgaatttaccgtcacgtggcagaaaatagacaataatccccacagtgccgatgaatatcagtgctctgtatagcaaatctctgagtgagaactctttttgggtattgaaataactcatatcggctgaaatttttgcgaaaagtacaaaaaaaaacattagtgtggaaaaaaaggtttaattttgccgtctaaaatattcataagtaaggtagattatgacagaaagaaaggtcagagtccgttttgccccgagtcctacgggggcgttgcacatcggcggtgtgcgtacagctttatacaattatctctttgcgcgtcagcatggaggagatttgatatttcgtattgaagatactgattccaaccggtttgtaccgggtgcggaagaatatatcctggagtctttcaagtggttgggcatcccgtttgacgagggcgtgagtttcggtggagaccatggcccgtaccgtcagtcggaacgtcgggaaatatacaagaagtatgttcagattctgctggaggccggaaaagcctacatcgctttcgatactcctgaggagctggaagtaaagcgtgcggagattgcgaatttccagtacgatgcttctacccgcatgcagatgtgcaattcactggcccttcctaaagaagaggtagacgcgctgattgctgccggtaagcagtacgtggtgcgtttcaagatagagccgaacgaagatgtgcatgtgaacgacttgattcgtggggaagtggtgataaactcttccattcttgatgacaaggttctttataaatcggcagatgaactacctacttaccatctggccaatattgtggacgaccatttgatggaagtgtcccatgtgatacgtggtgaggaatggttgccttccgcaccgttgcatgtattgctctaccgtgcctttgggtgggaggataccatgcctgcctttgcgcatttgcccttgttgctgaagcccgagggtaacggcaaattgagtaagcgtgacggcgaccgtctgggcttcccggttttcccgttggagtggcatgaccccaagtcgggagatgtctcttcaggttaccgcgaatctggttatctgcccgaagcggtcattaatttcctggctctgctgggctggaatccgggcaatgaccaggaactgatgtctatggatgaattggtgaaattgtttgatttgagccattgtagcaagtcgggtgccaaattcgactataagaaaggtatctggttcaaccatgagtacatcatgatgaaaccggatgcggagatagcttgtcttttcaggccggtgctggagtctaacggcatagatgcctccaactatagcgacgagttccttacgaaagtgatttcactggtgaagggacgcgtcaacttcgtaaaggaactgtgggaccagacccgtttcttcttcgtagctcccacggaatatgcggcaaaggatgtgaagaaacgttggtcggaagatactccccgcatcatggctgaattgatggatgtgctgcgcggtatcggggatttctcctccaagccttccgaagatattgtgattggctggattaccgagcgtggctatcacatgggaaatgtgatgaatgccttccgcttgtcagtggtgggcgagtgtaaaggtccgcacatgttcgacattaccgagctgattggcaaggaagagacgttggtccgtatacagcgtgctgttgatgctttaaagtgaataaatcttcttcatccttaatccatatagtatgctatatgacttggcaatagccatctacgatattctggtgcatctggctgctccatttagccgtaagccccgaaagatgatgaagggacactgggtggtttatgaacttctccggcagcagttggagaaggacgtgcgctatatatggttccatgccgcttctttgggggagttcgagcagggacggccgttgattgagaaaattcgtgccaaatatccggattacggtattctgctgactttcttctcgccgtcgggctatgaggtccgcaagaattataggggggcagacgttgtctgctacctgcctttcgacaagcctcgaaatgtgaagaagttcctggatatcgtgaatccctgcatggcattcttcatcaagtacgagttctggaagaactatctggacgaactgcataagcgtcgtattccggtgtacagcatttcctccattttccgtcgcgggcaagtatttttcaagtggtatggcggtacgtacagacatgtgctgcgcgacttcgaccatttgtttgtgcagaatgaacgctccaaacgctatctggcgaagataggcatcagccgtgtcacggtggtgggggatacccgttttgaccgtgtgctgcagatttgtgaggaagctaagcgtctgcctttggtggagcttttcaagaacaatacgatgacttttgtggcaggaagctcttggcagccggacgaggatttatttattgaatacttcaatcagcatccggaggtgaagttgattatcgctccgcatgtcatcgacgagaaccatctggtagagattatccgtaaactgaaacgcccttatgtgcgctatacccgtgccaacgagaagaatgtccgtaaggccgattgcctgattattgattgcttcgggctgctctcttccatttaccgctatggcgagattgcctatatcggaggtggtttcggagtgggaatccacaatacccttgaggctgcagtttatggcattccggtgattttcggaccgaagtatcagaaatttcaggaggccatccagttgctggagacaaaaggcgctttctcggtgaaggattatgaggagctgaaaactttgctcgaccgtatgctgacagatgaagtctttttgcgcgaatcaggcatgaatgcaagcaattatgtgaccagcaatgccggtgcgacggataagataatgagtatgataaacttttagaagagtaaagagtgataacgatagggcgataaaggtgatggaatggcatccctttatcgccctgttttttaggggggccttgcctccctttatttgtaccagtcggaatacatcagatagttgtgtgcaatcttctggttcagctccttggcctgcttcgggtccactttcttgatgaacttggcggggactcctccccaaatgcttcccggctcgatgaccgtattactcaataccagggaaccggcggcgacaatggccccttcgcccactactgcgtggtcaaggatggtggaacccatccctaccaaagcatagtccttgatggcagctccgtggatggtcacgttgtgccccacggatacgtggtctcctatctctatggtcgatttctcgtacaaggtatggagtacgcttccatcctggatgtttactccgtttcctatgcggattgaatttacgtcacctcgcagcacggtgctgaaccagatgctgcaatcccgtcccatcttgacgtcaccaatgataaccgcattgtccgccaaaaaacaattctccccgatttcgggagtgaatcctcttactgattttattaatgccattttttagtgattagtagttaggttactgcatgcttccttcagccattcccgttcttcttcgttcaggcttggcgaaagtttctcgtatacatgctggtgatagttgtccagccatgccgtttcctctgccgtcagcatctctttgatgatacctttcttgcagatggggcagagggtaatggtttcgaatttcaggtaatttccgaacatgccttcacggtccttcacggtcagcatcaggttttctgtgcgtattccatgacttccggctttatagacgcccggttcgttggaagtgaccattcccggccggagggttaccggattctcgttcatacggatgctttgcggaccttcgtgcacattgaggaaatgacctacgccgtgtccggtaccatgcaggaagttcatgtggtgctgccatatcggcatgcgggccagtacatccagttgcgctcctcgcgtaccttccgggaagacagccatggcaaggttgatatgtcctttcagtatcagggtgtagtccgtcttctcttcttcggtcagttcccccagtgcgatggtgcgggtgatgtcggtagtgccgtccaggtattgcgcacccgagtccaggagcaggaatccctcgggtttcagtggcacgtccgtttccggagtggcttcgtagtgtacaatggctccatgctccttgtacccggcaatggtgtcgaagctttcccccatgtagagtggctgtgcggcacggaattcgtgtagtttcttgtctacgctgatttctgtctcgttgcctgcgggaacggcctcctccagccatttcaggaatttcaccagtgccactccgtcgcgttgcatggctgcgtggatgccggctatttcccggtcattgcggactgctttcagcaaggctatcggtgagcgctcgtcaagtacccggcaggaaggggggagggcagaataaacggcataattcgtccttcccatgtcgagcatgatgctgccgtccggtatttttgtcacaaaggattcggtgtcctcataagcgtggatggtgacgccggcttcttccagataggctgaaagctcttccgttactttctcgggctggatgaaaaagtgtgtttcttgttcgttgattatcagatagctcactactacggggttgcaatgcacatcgttgccgcgtatgttgagtgcccatgctatctcgtccaatgccgacaccaataatacgtctgcttcgcttttcttcatttcccggcggatatcagccagtttgtccgggcagcttttcccggcgtatttcatctcgtggataaaggcgggtgcttcgggcatgggagggcggtctgtccatatctcattcatcgggtcggcaatgctctttatggtgatgtcgttttttgccaaatcctcttgcagggctatggcttgtgtggtggaaaatacctttccgtctatacctacaactgaattcgctgtaaggttctcccgcaggaaatcgaggatgctgggcgtttcgggcaacatttccttgtataagtcgatgccgctgccttccagctgctgctcggcttggagaaaatagcgggaatctgtccacagccccgccttgtcggtggtaatcaccaccgtgcctgccgaaccggtaaaacctgatatccattctcttgatttccagtacggtgctacgtactcgcttaggtgcgggtcggtactggggataatgaaagcgtctatgccttctctttttaacaatgcccgtaaagcatctatacgttgattgattgtctgagccatatttttataaatgtaattaagtaggcgtgtaaatgagtttataatctctccattctctgctttcaaagttacacattctcttttaaaaaattgccatgcttcacggattttagcggattggctcaataaaaacatctttccctctgctcattcgtttgataattaggaattatgggtaatttttttgcagaaagttttgtgaataaagaaagtatgtgtaattttgccgctcaatttgatcgtgagatttttaaaccattaacatttaattaaaagaaaatgattgtagtacctgtaaaagaaggcgaaaacattgaaaaagcgctgaagaaattcaaaagaaagtttgaaaaaactggcacagttaaggaattgagacgcagacaacagttcgataaaccgtctgtgactaaaagacttaagaaagaacgtgctgtttacgttcaacaacttcagcaagtagaagattaataattcgtaaattcctttgaattattgaattctttttcatacattcgttgcatgattttagatatgtagcgatatgttgttgacagattcttttcttgactatcttctgtacgagcggaactattccaaaggtacgattgagtactatcggacagatattcttgaactgcagaggtttggagaagaaatgtggggggacttgactccatcggatgtagatgcagaacttgttcgtgaatggattgcttccttgatggacaaaggacttgcttctaatacgataaaccgaaagctgagctctatccggacatattataaattccttttgaggagaggtgaggttgcggtagatccgttacgaaaagttacggggcccaaaaagaaaaaaccgcttccagtatttctgagagaaggtgagatggataggttgctggatgatatggattttggtgaaggttttgaagggtgtcgcgaccatatgattgttgaaatgttctatgctaccggcatgcgactttcagaattgatagggttggatgacaaagatattgatttttcggcttctctcgttaaagtgacaggaaagcggaataagcagcgtcttataccttttgatgaggagctggggcgctcgatgagggaatatgtcaatgtgcggaatgaggctgttccggttcgctcggatgctttttttatccggaagaatggaaagaggctttaccgcggtatcgtagcatgccttgtgaaacgaaacctttcgaaggtagtgactgtaaaaaaaagaagtccccacgtgctgaggcacacctttgcaacggctatgctgaacaatggtgctgatttaggttcgataaaagaactcctcgggcacgagagtctggcgacaacggaaatttatacgcatactacttttgaagagcttaaaaaagtgtataatcaggctcatccccgagcctaaagtaaaaaggaggtaagtatggaagtaagaattcaatcgattcactttgatgcgtcagagcaattgcagtctttcgttcaaaagaaagttgctaagttggagaaattttacgacgatataaagaaagtagaggtgtcattaaaggtagtaaaaccagaaacagccgaaaataaagaagccggagtgaaagtgttggttcccaatggcgagttttatgcaaacaaggtttgtgatacgtttgaagaagcggtagatttatgtctggaagctttggaaaaacagctggttaagtacaaggaaaagcaacggagcaaataattttccgctaaaattttgcgggtaaaaaataaatgtctaaatttgcagccgtttcgctcacgctatgaacgttacggttgcattttttagcttgcctctttagctcagttggccagagcacgtgatttgtaatctcggggtcgttggttcgaatccgacaagaggctcgctcaaggatgagtggaataagtctttcttcacgaggtggaggtgatatgaaaacggaaatcgttcgggtaaagtttactctgcgatgatttagtaaggaaaagagttctttttataatgtaggggcaaataccagagtggccaaatggggcagactgtaaatctgctggcttacgccttcggtggttcgaatccatctttgcccacaactcttattctccttgctgttatagctcagcggtagagcacttccttggtaaggaagaggtcccgggttcaagtcccggtaacagctcacaaaaatgtaaaagctgattattaatcaaataaataacaagtaaagctatggctaaagagaaattcgaacgtaccaaaccgcacgtaaacattggtacaattggtcacgttgaccacggtaaaaccacgttgacagctgctatcactacagtgttggcaaagaaaggtctttctgaactgcgttctttcgattctatcgataacgctcctgaagaaaaagaaagaggtatcactatcaatacttctcacgtagagtatgaaacagctaaccgtcactacgctcacgtagactgcccgggtcacgctgactacgtaaagaacatggtaactggtgctgctcagatggacggtgctatcatcgtagttgctgctactgatggtccgatgcctcagactcgtgagcacatcttgttggctcgtcaggtaaacgtaccgagactggttgtattcatgaacaagtgtgatatggtagacgacgctgaaatgttggagctcgttgaaatggaaatgcgtgaactgctttcagcttacgaattcgatggcgacaacactccgtttatccagggctctgctcttggtgcgttgaatggcgttgaaaagtgggaagagaaggttatggagctgatggaagcttgtgatacttggattcctctgcctccgcgtgatgttgataaaccgttcttgatgccggttgaagacgtattctcaatcactggtcgtggtactgtagctactggtcgtatcgaagctggtgttatccatgtaggtgacgaagttgaaatccttggtttgggtgaagacaagaagtcagttgtaactggtgttgaaatgttccgcaagttgctggatcagggtgaagctggtgacaacgtaggtctgttgctccgcggtatcgacaagaacgaaatcaaacgtggtatggttctttgtaagcccggtcagattaaacctcactctaagttcaaagcttctatctacgttttgaagaaagaagaaggtggtcgtcacactccgttccacaataaataccgtcctcagttctatctgcgtactatggactgtacaggtgaaatcactcttccggaaggaactgaaatggtaatgcctggtgataacgtagaaatcactgtagaactgatctacccggtagcattgaacgtaggtttgcgtttcgctatccgtgaaggtggtcgtacggtaggttctggtcagattactgaaattcttgactaataaccaatataatcttaatcagttcccggtatacatcgggaactgattatgtacaaacgggagtagctcagttggtagagcaccggtctccaaaaccgggtgtcgggagttcgagcctctcctcccgtgctaatatttttgaaatgaagaagattgtagcttattttaaagaaacttacgacgaacttgttcataaagtgtcgtggcctacgtattctgaacttactaacagtgcagtagttgttttatatgcttccctactaattgcagtggtagtatttgcgatggacttctgtttccagcatctgatggaatttgtttatccacattaaaagtaagaagaaatgtctgagattgaaaagaaatggtacgttttgcgtgctattagcggaaaagaagctaaggtaaaggaataccttgaagctgatattaaaaacagcgaccttggtgattacgtatctcaggtattgattcctaccgaaaaggtatatcaggttcgcaatggtaagaaaattgtgaaagagagaagttatctccctggttacgttttggtggaggctgctctggtgggtgaggttgctcatcatctgagaaatactcctaatgtgatagggttcttgggtggttcggaaaaacccgtacctctgagacagtcggaagtgaatcgtatacttggtacggttgacgaattgcaggaatcaggtgaagacttgagtatcccgtatgtagtcggcgagactgtaaaggtgaattacggtccgttcagtggattcagtggaatcattgaagaagtgaacaccgagaagaagaaactgaaggtcatggtcaagatattcggacggaagactccgctcgaattgggctttatgcaagttgaaaaagaatagtgcaggtgttacgctgtagtattcttcattaatgtttatatataaatcaattagaaaatggctaaagaagttgctggactaatcaaattacagattaaaggaggcgcggcaaatccatctcccccagtaggacctgctttgggttccaagggtatcaatatcatggagttttgcaagcaattcaacgccagaacccaagacaaagcaggaaagattcttcctgtgattatcacttactacgcagacaagtctttcgattttgtaatcaagactcctcccgtggctatccagttgttggaagtgacgaagcaaaagagtggttctgctgagcctaaccgtaagaaggttgccgagattacttgggaacaagttcgtacgattgctcaggacaaaatggttgacttgaactgtttcactgtagaagctgccatgaaaatggttgccggtacagctagaagtatgggtatcgctgtaaaaggggagttcccggttaataattaataaacttcaattagaatgggtaaactgacaaaaaatcaaaagttggctgcagaaaaaattgaagcagggaaagcatactctctcaaggaagctgctcagttggtaaaagaaatcacttataccaagtttgacgcttctctggatatcgacgtacgtttgggcgttgacccgcgtaaggccaaccagatggtgagaggtgttgtatcacttcctcacggtactggtaaggttgtacgcgttttggtgctttgtacaccagatgctgaagctgctgcaaaagaagccggagctgactatgttggtcttgacgaatatattgaaaagatcaaaggtggatggactgatattgatgtgattatcactatgccgtccatcatgggtaagattggtgcactcggtcgtgtgctcggtcctcgtggattgatgcctaaccccaagagtggcactgtaactatggatgttgctaaagctgtaagagaagtaaaacaaggtaaaatcgacttcaaggttgacaagagcggtattgttcatacttctatcggtaaagtttcatttagcgctgagcaaattcgcgacaatgcgaaagaattcatctctactttgaataaattgaaaccgactgcagccaagggtacatatattaagagtatttatctttctagcacgatgagtgcgggcatcaagattgacccgaaaacagtagaagaaatctaataaaacggagtaataatgagaaaggaagataaaagtacgattattgagcagattgctgctacagtgaaggaatacggtcacttctatttggtggataccactgccatgaatgctgctacaaccagcatgttgagaagagaatgtttcaaagctgacatcaaattgatggtagttaagaatacattgcttcacaaggcattggaaagcctggaagaagacttttctccgctttatggttctctgaaaggtacaactgccgtaatgttcagcgacgttgctaacgcaccggccaagttgatcaaagataaggctaagaatggtattcccggactgaaggctgcatatgcagaagaaagcttctatgttggtgctgaccagttggatgctctcgtaagtatcaagagtaagaatgaagttattgccgatatcgttgcattgctgcagtcaccggccaagaatgttatttctgctctgcaatcaggtggtaacaccctccacggagttctcaagactcttggtgaacgtcccgaagcgtaaatttcggaaaaagaattatatcaatttatttagtatttaaacaattaaaaatcatacaaaaatggcagatttgaaagcttttgcagaacaattagttaacttgacagtaaaagaagttaatgaacttgcaacaatcctgaaagaagaatatggtattgaacctgctgctgcagctgtagctgttgctgctggtcctgcagctggtggtgctgctgccgcagaagaaaagacttctttcgacgtagtattgaagagcgctggctcagctaaacttcaggtagttaaagccgttaaggaagcttgcggtcttggcttgaaggaagctaaggacatggtagacggtgctcctagcgtagtaaaagaaggtttggctaaagacgaagcagaatcattgaagaaaacattggaagaagctggagctgaagttgaacttaaataacattagcctgtaaatcaggtaattcggttaggaacccttcgtgaaaagggttcttaacctttttgtgtatatatttaaaattaagttctacaaatccattaacagatgtcttcaaatactgtaaatcaaagagttaattttgcttcgactaagaatccgcttgaatatccggattttctggaagtacaattgaagtcattcaaagactttctacaactggacaccccacccgagaagcgtaagaacgagggactgtataaagtatttgctgaaaacttccccattgccgatacaagaaataattttgttcttgagtttttggactactatattgatccgccgcgctataccattgatgaatgtatagagcgagggcttacatatagcgtgcctttgaaggcaaaattgaaattatattgtaccgaccccgaccacgaagattttgacacggtcattcaggacgtgttcctaggtcccattccttacatgacggataaggcgacattcgtcatcaacggtgcggaacgtgtggttgtatcccaacttcaccgttcaccgggcgtatttttcggacagagcgtacatgccaacggtaccaagttgtactcagcccgtatcatcccgttcaagggttcgtggattgagtttgccaccgacatcaacaacgtcatgtatgcttacattgaccgtaagaagaaattgccggttactactttgctgagagccatcggttttgagaatgacaaggacattctcgagatctttaatttggcggaagacgtgaaggtaaacaagacgaatctcaagaagatggtgggacgtaagttggccgcacgtgtgttgaaaacatggattgaggattttgtagacgaagataccggtgaagttgtttccatcgagcgtaacgaagtcgttatcgatcgtgaaactgtaatcgagccggaacatgttgatattatattagagtcgggtgttcagaatatcctcgtacacaaggaagaaccgaaccagtctgactattctattatatataatactctgcagaaggatccgagtaactcggaaaaagaagctgtactctacatctaccgccagctgcgtaatgcagacccagccgatgatgccagtgcacgcgaagttatcaataacttgttcttctcagaaaagagatatgacctgggtgatgtaggccgttatcgtatcaacagaaagttgaacttgacgaccgatatggacgtgcgtgtccttaccaaggaagatattatcgaaattatcaaatatctcatcgagttgattaactcgaaagcggatgtggatgatatcgaccacttgagcaaccgtcgtgtgcgtacagtgggcgaacagttgtccaatcagtttgccatcggtctggcacgtatgtcgcgtactatccgcgaacgtatgaacgtccgtgacaatgaagtctttactcctattgacctgattaacgccaagacaatctcttccgttatcaattcattctttggaacgaatgctttgtcacagttcatggaccagaccaacccgctggccgagattactcacaagcgccgtatgtctgccctgggtcctggcggtttgtcacgcgaacgtgcaggcttcgaggttcgtgacgtacactatactcactacgggcgtctttgtcctatcgagactcctgaaggtccgaacatcggtttgatttcttcactctgcgtatttgcgaaaatcaacgagctcggcttcattgaaactccgtaccgtaaggtggcagatggtaaggttgacctttctgacgaaggtttggtttacctcaccgcagaagaagaggaagccaagattattgcgcagggtaatgctcctttgaacgatgacggtacttttgtacgtgataaagtaaaatcccgtcaggatgccgactatccggtggttcctccttccgaggtggaattgatggacgtatctccccagcagattgcttctattgcagcttctttgattccgttcctggagcatgatgacgccaaccgtgcattgatgggatcaaacatgatgcgtcaagctgttcctttgttgaagagcgaagctccgattgtaggtactggtatcgaacgtcagctggcacgcgattcccgtacgcagattactgccgagggtgacggtgtggttgaattcgtggatgcaacgactatccgtattctgtacgaccgtacggaagaggaggaattcgtaagcttcgagcctgcattgaaagaatataatatcccgaaatggcgccgtaccaaccagaacatgacgattgacctccgtccgatttgcgagaagggccagcgcgttactgcaggtcaaattttgacagaaggttattcaaccgaagacggagagcttgcattgggtaagaacctgctggttgcttacatgccgtggaagggctataactatgaggatgctattgtactgaacgaacgcgtggttcgtgaggaccttttgacttctgtacacgtggaagaatattctttggaagttcgtgaaacgaagcgtggtatggaagagttgacttctgacattcccaatgtaagtgaggaagcgactaaagaccttgacgaaaacggtattgttcgtgtgggtgcccgcatcgagccgggggatatccttatcggtaagattactccgaagggtgaatcagatccttctccggaagagaaactgctccgtgccatcttcggtgataaggccggtgatgtgaaggacgcttctttgaaagcttctccttctttgaaaggtgttgttatcggtaagcgtctgttctctcgtgttattaagactcgcagctccaagctggccgacaaggctctgctgccgaagattgacgacgaattcgatgccaagataggtgatctcaagaaagtattgataaacaaactgttgaagcttacagaaaactatacatcggaaggtgtgaaggattacatgggtgccgacataatttccaaaggcgccagattctctgcttccgacttcagtgatttggacttcactgctgttcagttgagcaactggacgaaggatgaacataccaacggactgattcgtgcgttggtgatgaacttcatcaagaagtataaggaactcgatgccgagttgaagcgcaagaagtttgccattactatcggtgacgagttgcccgcaggtatcattcagatggccaaggtatacattgccaagaaacgtaagattggtgtcggtgacaagatggctggtcgtcatggtaacaagggcattgtttcccgcgtggtacgccaggaagacatgccgttccttgctgacggtactccggtagacatcgtgctgaatccgttgggtgtgccttcacgtatgaacatcggtcagatattcgaggccgttctcggtcgtgccggaaagaacttgggcgtgaagtttgccactcctatctttgacggtgcatctttggacgatttgaacgaatggaccgataaggccggcttgccccgttacggcaagacaacgctgtatgatggtggtaccggtgaagcattcgagcagcaggctacggtaggtgtgacctacatgctgaagctcggtcacatggttgaagacaagatgcacgcacgttccatcggtccgtactcactcattacgcaacagccgttgggtggtaaggcacagttcggtggtcagcgttttggagaaatggaagtttgggctctcgaagcattcggtgccgcacacattctgcaggaaatcctgactatcaagtctgatgacgttgtaggacgttccaaggcttatgaagcaatcgtgaagggtgagccgatgcctgctccgggtatccccgagtcactgaacgtattgctgcacgagttgagaggtttgggcttgagcatcaacttagaataatggataattgataattgagaatggataatgcaagttaccattctcaattatcggttttcagtttttcaatttcaattttccattgtcaattatcaattaaataaatttatggcttttagaaaagataacaagataaagagtaatttctcgaaaatctctatcggtttggcttctcctgaggaaatccttgagaattcgagtggtgaagttttaaagcctgaaaccatcaactatcgtacgtataagcccgaacgcgacggattgttctgcgagcgcatctttggtcctatcaaggattacgagtgccattgcggtaagtacaagcgtatccgttacaaaggcatcgtctgcgaccgttgtggtgtggaagtgactgaaaagaaagtgcgccgtgagcgtatgggacatatccagctcgttgtgcccgtggctcacatttggtatttccgttcacttcccaacaaaatcggttacttgttgggcctgcccaccaagaaactggatgccattatctattacgagcgttatgttgtcattcagccaggtgtactgtccgacgaagtggcacagtacgacttgctggaagaaggagaatacctggacttactggaaaagttgccgaaagacaaccaattcctcgaagattcagaccccaataagttcattgccaagatgggcgcggaagctatctacgatttgctgtcacacctcgatcttgactctttgtcttacgaactgcgtaatcgtgccggaagcgatgcttcacaacaacgcaagaccgaagccctgaaacgtcttcaggtagttgagtcgttccgtgcatcacgtggacgcaacaagcctgagtggatgattgtacgcattgtgccggttattccacccgaacttcgtccgttggttccgttggatggagggcgtttcgcaacttctgacttgaacgatctttaccgtcgtgtcatcatccgtaacaatcgtctgaagagattgattgaaatcaaggctcctgaggtgattttacgtaatgaaaaacgtatgttgcaggaagctgtcgactctctgttcgacaactctcgtaaatcgagtgctgtgaagactgacgctaaccgtccgttgaagtcactttctgacagtttgaagggcaagcaaggacgtttccgtcagaatttgttgggtaagcgtgtcgactattccgcacgttctgtaatcgttgtaggtccagagttgaaaatgggtgaatgcggtattccaaaactgatggcagctgagctttataagccgttcatcatccgtaagctcattgagcgcggtatcgtgaagacagtaaagagtgccaagaagattgtagatcgcaaggaacctgttatctgggatattctggaacacgtgatgaagggtcatccggtgctgttgaaccgtgctccgacacttcaccgtctcggtattcaggcattccagcccaagatgatcgaaggtaaggcaatccagctgcacccgttggcatgtacggcgtttaatgccgacttcgacggtgaccagatggccgttcacttgccgctgagcaacgaagcgattctggaagcacaaatgctgatgctccagtcacacaatatattgaaccctgctaacggtgctcctatcactgtgcccgcccaagatatggtactcggtttgtactacatcactaagttgcgcaaaggtgccaaaggtgaggggttgacattctacggtccagaagaagcactgattgcctataatgaaggtaagtgcgacattcacgctccggtaagcgtcatagtgaaagacgttgatgagaatggcaacattgtggacaagatgatgcacgatacctccgtgggccgtgtcattgtcaacgaaattgttccggcagaagcaggatatatcaatacgattatctccaagaagtcactccgcgatatcatcagtcacgtaatcaaggtgtgtggtgttgccaaggcagccgacttcctcgacgggatcaagaacctcggttactacatggccttcaagggtggtctgtcgttcaacttgggggatatcatcatcccggaagagaaggaagcattagtacagaaaggttatgatgaagtagagcaggtaatcaataactataacatgggtttcatcaccaacaacgagcgttacaatcaggtaatcgatatctggacacacgtgaactcagagttgtccaacatcttgatgaaaaccatttcaagcgacgaccaggggttcaactctgtatacatgatgctggattccggtgcccgtggttctaaggaacagatccgtcagctctccggtatgcgtggtttgatggcaaagccccagaaagcaggtgccgaaggcggtcagattattgaaaatccgattctttctaactttaaggaaggtctgtccgtgttggaatactttatctctactcacggtgcccgtaagggtcttgccgataccgctttgaagacggctgacgccggatacctgacccgtcgtctggttgacgtatcgcacgatgtgattattaatgaagaagactgcggcacgctccgcggattggtttgtacagcattgaaaaacaatgacgaaaccatcgccactctgtatgaacgcatcctcggtcgtgtatccgtacatgatattgttcatcctacaactggcgaactgattgtggctggcggtgaggaaattaccgaagacattgcgcagaagattgaagattccccgattgagagtgttgaaatccgttccgtattgacctgcgaatccaagaagggtgtttgtgccaagtgttacggacgtaatctggcttccagccgcatggttcagaaaggtgaggcagtcggcgtaattgctgcacagtctatcggtgagccgggtacacagttgacactgcgtacattccatgccggtggtacggcagccaatatcgctgccaacgcaagtatcgtggctaagaaccctgcccgtttggaattcgaagaactccgtacggtagacgttattgacgaagcaggcgaacctgcaaaggtagtggtaggccgtctggctgaagtgcgtttcgtggatgtcaacacgggtattgttctttctacccacaacgtaccttacggttctacgctctatgctgctgacggtgaaatggtagagaagggcaagatgattgcccgttgggatccgttcaacgcagttatcattaccgaagctaccggtaagattgaatttgaaggcgttattgaaaacgtgacttataaggtagagtctgatgaatctaccggtttgcgcgaaatcatcatcattgagtctaaggataagacgaaggtgcctaccgcacacatcatgacagaagacggcgaactgatccgtacatacaacttgccggtaggtggccacgtggtggttgaggacggtcaaaaggtaaaggccggtgaagttatcgtgaagattccgcgtgccgtaggtaaagcgggtgatatcacgggtggtcttccccgtgtcactgagctgtttgaggcacgtaacccgtctaatcctgctgtggtttcagaaatcgacggtgaggttaccatgggtaaagtgaaacgcggtaaccgcgaaatcatcgttacttccaagaccggcgaagtgaagaagtacctcgtaccgttgtccaagcagattttggttcaggagaacgactatgtacgtgccggtactccgttatcagacggtgctatcacacctgcggacatcctggccatcaaaggtcctacagccgtgcaggaatatatcgtgaacgaggttcaggacgtttaccgtctgcagggtgtgaagattaacgataagcactttgaaatcatcgtacgtcagatgatgcgcaaggtggaaattgacgagccgggtgatacccgcttcctggagcagcaagttgttgacaagatggaattcatggaagagaacgaccgtatctggggaaagaaggtggtagtggatgctggagattcccagagtttgcaggctggtcagatcgtgacggcccgcaagctgcgtgacgagaactccatgttgaaacgccgcgacttgaaacccgtggaagtgcgcgacgctgtacctgcgacttctactcagattcttcaaggtatcacccgtgctgcattgcagacttcaagcttcatgtcggctgcttccttccaagaaacgacgaaggtgctgaacgaggctgccatcaacggaaaggtggaccgtctggaaggtatgaaggagaacgtaatctgcggtcacctgattcctgccggtaccggacagcgcgagttcgagaagattattgttggctccaaagaagagtacgaccgtatgcttgctaacaagaagacggtacttgattatgctgtagacgagaaagtagagggataaccttacaacgtcaatataattctattaaatagagagagggaatatcctataagaaggagtattccctctctgttttatctttgcctcttccttctgtattgcaacgcttctgcatgtttgttatagtgctactgcaaaacgattgtagtggcttgcttctttttctggacggattattatgtgtcttttggggacttaaatgtatatcgtccgaaaaaaaagagtacttttggtctatcttttaagaacattttaaaaataattgtgcaacatggaaaatcaagaaaacaacaacggtcaacttcagatagaattgaaggaagaagtggcgcaaggtacatatgccaatttggctattataactcattccagttcggaatttattctcgactttattcgcgtgatgcctggaatgccaaaggctggtgtgcaatcgcgcatagttttggcacccgaacatgccaagcgtttgctgcgtgcactcgaagagaatattgggaaatacgaacgctctttcggaccgattcacatgccggacgaacaaacatttccgcctcttcccaacatcaagggtgaagcgtaaaattaaaaaaaaacttgtagtgcattgattattcaaaacttattagtatctttgcagcccaaaagtgtatagttctgaattaatataaacaataatatataactaaaaacaattaaaatgcctacaattcagcaattagtaagaaaaggacgcgaagtgctggtggagaaatcaaagtctccagccttggactcttgtcctcaaagacgtggcgtttgcgtgagagtgtatacaaccactccgaaaaaaccgaattcagctatgcgtaaagtagctcgtgtacgtttgaccaatggtaaagaggtgaactcttatattccgggagaaggtcacaatttgcaagaacactctattgtattggtacgtggtggtcgtgtaaaagaccttccgggtgtgcgttatcatatcgtacgtggtactttggatactgcaggtgttgcaggtcgtacacaaagacgttccaaatacggcgcaaaacgtccgaaaccgggtcaagcagctcctgctaagaagaaataatctggtggcctgatatccaaaaacagaaaaattaaaagtaataacttacgttttagtttgttggaaatgctaaaggttgagtaaattctccggagggagagttgaagaagacagaagtaaacaaccaagaacgaaaaacattattctttcagacaaatgagaaaagcaaaaccgaaaaaacgcgttatccttccggatcccgtgttcaatgatgtaaaagtttccaagttcgtgaatcatttgatgtacgatggaaagaagaacacttcttatgaaatcttctatgctgcgttggaaacagtgaagaataaaatgcagaacgaagagaaatccgctcttgaaatttggaaaaaagctctggataatgtgactcctcaggtggaagtgaagtctcgccgtgtgggtggtgctactttccaggttcctacagaaatccgtgctgaccgtaaggagtcaatttcaatgaagaacttgattatctttgcacgtaagcgtggtggcaagtcaatggctgacaagttagccgctgaaatcatggatgctttcaacgaacagggtggtgcttacaaacgtaaagaagacatgcacagaatggcagaagctaaccgtgcgtttgctcatttcagattctaatactataagagactaaccaattagaagattaaaaacttaaagtaagggaattagaaaatggcaaagcatgatttacatttgacacgtaatatcggtatcatggcccacatcgatgccggaaagacaacgacctctgaacgtattttgttttacacgggtttaacccacaaaatcggtgaggtgcacgatggtgccgctacaatggactggatggagcaagaacaggaacgtggtatcactatcacttctgctgctactaccactcgttggaaatatgccggtgatacttataaaattaacttgattgacactccgggacacgttgactttaccgctgaggtagagcgttctttgcgtattcttgatggcgccgttgctgcttactgtgcagtaggtggtgttgaaccgcaatctgagacagtttggcgccaagctgacaaatataacgtaccgcgtatcgcttacgttaataagatggaccgttcgggcgctgacttctttgaagtagttcgccaaatgaaggatgttttgggagctaatccgtgtcctatcgtcgttcctatcggtgctgaggaatctttcaaaggcctggtagaccttatcaaaatgaaagctatctattggcatgatgaaacaatgggcgctgactatacagtagaggaaatccctgcaaatctggtagacgaagctaacgaatggagagataagatgctcgaaaaggtggctgagtttgatgatgctttgatggagaaatatttcgatgatccttctaccattacagaagaagaggttttgagagctctccgtaacgcaacagtgcaaatggctgtcgttccgatgctttgcggttcttcattcaagaacaaaggtgtacagacattgcttgattacgtttgtgcattcttgccttctccgctggatacagagaatgttgtcggtacaaatcccgaaactggtgctgaagaagatcgtaaaccgagcgaagacgaaaagacttctgctttggcatttaagattgcaactgacccgtatgtaggtcgtttgactttcttccgcgtttattccggtaagatagaggctggttcttatatctataactctcgttctggtaagaaagaacgcgtatcccgtttgttccagatgcactcaaacaagcagaatccggtagaagttatcggtgctggtgatattggtgctggcgtaggtttcaaggatatacatactggtgatacattgtgtgacgaaactgcaccgattgtattggaatctatggacttcccggaaccggtaattggtatcgctgttgagcctaagactcagaaagatatggataagctgtcaaatggtttggctaagttggctgaagaagacccgacgttcacagttaagactgacgaacagactggtcagacagttatctctggtatgggtgagctccacttggatattattatcgaccgtctgaaacgtgagttcaaggttgaatgtaaccaaggtaagcctcaggttaactacaaggaggctatcactaagacagttaatttgcgtgaagtttacaagaagcagtctggtggtcgtggtaaattcgctgatattatcgtgaatatcggcccggttgatgaagacttcaaggaaggtggattgcaattcgttgacgaagtgaagggtggtaacatccctaaggaatttattccgtctgtacagaagggcttcactactgctatgaagaacggtgtgttggctggttatccgctggattcactgaaagtaactttgattgacggttctttccacccggttgactctgaccagttgtctttcgaaatctgtgctatccaggcatataagaacgcttgtgctaaggcgggtccggtattgatggagcctatcatgaagctggaagttgttactccggaagaaaacatgggtgatgttatcggtgacttgaacaagcgtcgtggccaggtggaaggtatggaatctagccgttccggtgcacgtatcgtgaaggcaatggttccgctggcagaaatgtttggttacgtaacagcattgcgtaccatcacttctggtcgtgcaacctcttcaatggtatattctcaccatgcccaggtttccaactctattgccaaggcagtattggaggaagtgaaaggccgtgctgacttaatctaaaaaaaacttgaagtcccgtaggctagcgaatgactcttagcctgcggaacttcatcttatataactatttaataactaaaaacagtaatgagtcaaaaaattagaatcaaactgaaatcttacgaccacaacttggttgacaagtcagctgagaaaattgtaagaacggtgaagacaacgggcgctatcgttagcggtccgattcctcttcctacgcacaagcgtatctttaccgtgaaccgttcgactttcgttaacaagaagtcgcgtgaacaattcgaactctcttcttacaagagactgattgacatctatagctcaacagctaagacagtagacgctctgatgaagttggagttgccgagtggtgtggaagtagaaattaaagtgtaagtattaaaaattaagtgaaatgccaggattattaggaaaaaaaatcggaatgacatccgttttcagtgccgagggtaagaatgtaccatgcactgttatcgaagcaggtccttgtgttgttactcaagtgaaaactgtagaaaaggacggttatgaagctgttcagctgggcttccaagataagaaggagaagcacactacaaagcctttgatggggcactttaaaaaagctggagtaactcccaagaaacacttggctgagttcaaagaatttgaaacagagttgaatctgggtgacactgttactgtagaactgttcaatgacacaacttttgttgacgttgtaggtacctctaagggtaaggggtttcagggcgtggtaaagcgccacggtttcggtggtgtaggccagactactcacggtcagcacaaccgcgctcgtaagccgggttctattggtgcttgttcttaccccgcaaaagtattcaagggaatgcgcatgggtggacagcttggtggcgacagagtaactgttcaaaacctgcaggtattaaaggtaatcgcggagcataatcttcttttgattaaggggtctgttcctggttgcaaaggttcaatcgtaataattgagaaataatggaagttaacgtatataacattaaaggtgaagacactgggagaaagattacgttaaacgagtctatcttcggaattgagcccaacgaccacgctatctacttggatgttaaacagtttatggctaaccagcgtcagggtacacacaagtcaaaggaaagaagcgaaatcagtggttctactcgtaaaatcggtcgccagaaaggtggcggtggtgcacgtcgtggtgacatgaactcaccggtacttgttggtggtggacgcgtattcggtccgaaaccgagagattactacttcaaattaaacaagaaagtaaaggctctggctcgtaagtcagctttgtcatacaaggctcagaacaacgcggttgtagtggtggaagacttctcttttgaagctccgaagactaaagatttcgttgcaatgacaaaaaatcttaaagtttctgacaaaaagctgcttgtgattttaccagaagcaaataaaaacgtatatttgtcggctcgtaatgtaaagggtgctaatgtgcagactatctcagggttgaatacttatagagtattggacgctggggttgttgtgtttgctgaaagtgcactttctgctatcgacaatatcttaatgtaaaaaggaggcttaaataatgggaattattattaaaccgttagtgacagagaagatgactgcaattactgataaaacgaacaatcgtttcggctttatcgtgcgtcctgaagctaataaactggaaattaagaaggaagttgaagccctttacaacgttacagtagttgatgtgaatacgatgaagtatgccggcaaaaataagagccgctatactcgtgccggtatcatcaacggacgtacgaatgcgttcaagaaagctatcgttacgttgaaagaaggagatactattgatttttatagcaatatttaataaaaatggcagtacgtaaatttaagcccacaacaccggggcaaagacataaaattattggtacttacgaagagattactgcacgggtaccagaaaagtctcttgtatttggtaagaaatcttcaggtggtcgtaacaatgaaggtaagatgactatgcgctacatcggtggcggtagtaagaagattattcgtatcgtagatttcaagagaaataaagacggtgtgcctgcagtggttaaaacaattgaatatgatccgaatcgttcggctcgtattgctttgttgttttatgcagatggagaaaaaagatatattattgctcccaacggattgcaagttggtatgactttgatgtcaggtgaggctgctgctccggaaatcggaaacgcacttccacttcagaatattccggtcggtactgtaattcacaacatcgaattacgtccgggacaaggcgctgccttggttcgctcggccggtaacttcgctcagttgacttccagagaaggtaagtactgcgttatcaagttgccttcaggggaggttcgtcagatcctcagtacttgtaaggctactatcggtagtgtaggtaactcagatcatggattggaaagttcgggtaaagctggacgttctcgctggttaggacgtcgtccgcgtaaccgtggtgttgttatgaacccggttgatcacccgatgggtggtggtgaaggacgtgcttcaggaggacacccgagatctcgtaagggattgtatgctaagggtcttaagacaagagctccgaagaaacaatcgtctaagtatattattgagagaagaaagaagtaatctgattaattgagtaaattatgagtcgttcattaaaaaaaggtccgtatattaacgttaagcttgagaagaaagtgcttgccatgaatgaatcgggcaagaaagtggtagttaagacctgggccagagcttcaatgatttcgcctgatttcgtaggccatactgttgcagttcacaacggaaataaatttattcctgtttatgttaccgaaaatatggtaggacacaagttgggagaatttgctccaactcgtactttcagaggacacgctggtaacaagaaaaaataaaacaggatttatctgaaataataaagtaataatataatgggagcaagaaaaaaaatatcggctgaaaaaagaaaagaagcccttaagaccatgtattttgcgaaattgcaaaatgttcctacttccccccgtaaaatgcgtctcgtggctgacatgattcgtgggatggaggtgaacagagcactcggcgttttgaagttctcttcaaaagaggctgccgcaagagtggaaaagttgctgcgctctgcaattgctaactgggagcagaaaaacgaacgtaaagctgaaagtggcgagctgttcgtaaccaagatttttgttgatggtggtgccacactcaaaagaatgagaccggctccgcagggtagaggttacagaattcgtaaacgttcaaaccacgtaacgttgttcgttggttctaaaagtaataacgaagatcaaaattaaggtaaatgggacaaaaagttaatccaataagcaaccgtttaggaattatcagaggatgggattccaattggtatggtggaaagaattacggcgactctctgctggaagatagcaagattcgtaaatatttgaacgctcgtctggcaaaggctagtgtgtcaagaattgtaattgaacgtacactgaaactcgtgactattaccgtttgtactgcacgtccgggtatcattatcggtaaaggtggccaagaagttgacaagttgaaggaggagttgaagaaggttacggataaggatattcagattaatatcttcgaagttaaaagacctgagttggacgctgttatcgtggctaacaacattgcccgtcaggttgaaggcaaaattgcctaccgtcgtgccattaagatggccattgccaatacaatgcgtatgggtgcggaaggtatcaagattcagatttcaggacgtttgaatggtgcagaaatggctcgttctgaaatgtataaggaaggaagaactccgttgcacactttcagagcagatatcgactattgtcatgcagaagcattgactaaggttggtcttctcggtattaaagtttggatttgtagaggtgaagtttatggtaagaaggagttggctccgaactttacgcaaagcaaggaaagtggtcgtggaagcaatagcggaaacaatggcggaaagaacttcaaaagaaagaaaaataatcgctaacgaatttgatttttaggaattatgttacaaccgaaaaaaacaaaattcagaagacaacaaaaaggccgtcaaaagggtaatgcccaaagaggaaaccagttggctttcggatcttttggtattaaggccttggaaacgaaatggattacaggccgtcagattgaagctgcgcgtattgcagtgacaagatatatgcaacgtcaaggacagatttggattcgtattttccccgacaagcctattaccagaaagccagctgatgtgcgtatgggtaaaggtaagggtgcaccggagggattcgttgccccagttacaccgggtagaattattatcgaagccgaaggagtatcttatgaaatcgctaaagaggctttgcgcttagctgcacagaagcttcctatcacaaccaagtttgtggttagacgtgattatgatattcaaaatcaaaatgcgtaaggagtatgaaaatagcagaaattaaagagatgcctaccaacgacttggtagaaagagttgaagcagaagtagctaattacaaccaaatgattttaaatcattctatttctcctttggataatcctgctcagatcaaacaattacgcaggactattgcgcgtatgaagactgaattacgccaaagagaacttaacaataaatgatgagcttgatggaagcaagaaatttaagaaaagaaagaactggggttgtgctgagcaacaagatggataagaccattacagtagcagctaagtttaaggagaaacaccccatatatggtaagttcgttagcaagacgaagaagtaccatgctcatgatgaaaagaatgagtgcaatatcggcgatactgtacacatcatggaaactcgtcctttgagcaagactaagagatggagattggtagaaataattgaaagagctaagtaattatgatacaagtagaatccagacttacagtatgtgataatagtggggcaaaagaggctctctgtatccgtgttttgggtggtacaggtcgtcgctatgcttcagtaggggacgtgattgtcgtttctgttaagagcgttatcccttcaagtgatattaaaaaaggtgcagtgtctaaagctttgatcgtacgtactaagaaagaaatccgtcgtgctgatggctcttacatacgttttgatgataatgcttgcgtgttgttgaacaatgcaggtgaaattagaggtagtcgtattttcggtccggtagctcgtgaacttcgtgctactaacatgaaagttgtgtcactcgctcctgaagtactttaatattgtaaaagatttgagtaatgagtaaattacatattaaaaaaggcgatacagtttatgtaaactccggtgaagacaagggtaagactggtcgtgtattgaaggttcttgttgataaaaaccgcgcaatcgttgaaggtatcaacatggtgtctaagagcacaaaaccgaatgctaaaaacccacaaggtggcattgtgaagcaggaagcttctgtccacttgtcaaatttgaatcccgttgatccaaagactggtaaagcaacgcgtgttggtagaaaagtaagtgctgaaggcactttagtgcgttattctaaaaaatcaggagaggagattaagtaatgagtaatactgctagccttaagaaagaatatgcagaccgtattgcgcctgcattgaaatcacagttccagtattcttcttctatgcagatacccgtacttaagaagattgttatcaatcaaggtttgggtatggctgttgctgacaagaagattattgaagtggcaattaatgaaatgactgctatcactggtcagaaagccgtggcaaccatttctcgtaaggatattgcaaactttaagttgcgtaagaaaatgccgattggtgttatggtaactctgcgtcgtgagagaatgtacgaattccttgaaaagttggttcgtgtagctctgcctcgtattcgcgacttcaagggtattgaaagtaagttcgatggtaagggtaactatacccttggtattcaggaacaaatcattttccctgaaattaatatcgatagtattactagaattctcggaatgaatattacctttgtaacctctgcgcaaacagatgaagaagggtatgccttgttgaaggaattcggtttaccgtttaaaaacgctaaaaaagattgataatatggcaaaggaatcaatgaaggcacgtgaagtaaagcgtgctaaattagtagccagatatgccgagaagagagctgcgttgaagcaaatcgttagaactggtgatcctgctgaagcttttgaagctgcacagaaattgcaggacctgcctaagaattctaatccgattcgtatgcacaaccgttgcaagctgactggtcgtcctaaaggatatatccgtcagtttggtatctccagaatccagttccgtgagatggcttctaacggtcttattcccggtgtaaagaaagcaagctggtaattttgttttttaaatattgtcagggtaggcctgattaatttaatttattttttatatgactgatccaatagcagattatttgacgaggttgcggaacgctattcaagcgaagcacagagttgtggaagttccggcttcaaatttgaaaaaagaaatcactaagattctttttgaaaagggctacattcttaattataagtttgtagaagatggtcctcaaggtacaattaaagttgccttgaagtatgatccggtaaacaaggttaacgctatcaagaagctggagagaatctcttctccgggtttgcgtcaatataccggttataaagacatgccgcgtgttattaatggtttgggtattgctataatatctacttccaagggtgtaatgaccaacaaagaagccgctgaactaaagattggtggtgaagttttgtgttatgtatattaataggaggaattagcaatgtcaagaataggaaaattacccattagtattcccgctggagtaacagttactctgaaagatgacgtggttaccgttaagggacccaaaggcgaaatgagccaatatgtaaatcctgctatcaatgttaccatcgaagacggtcatgttgttttggctgagaatgaaaatgcaatgctggataatcctaagcaaaagcatgcattccatggattataccgttcattggtacacaacatggttgttggtgtatcagaaggatataagaaagaattggaacttgtcggtgtaggttaccgtgcctctaaccagggaaatatcattgaactggctttaggttatactcacagtatctttatacagttgcctcctgaagttaaagttgagactaagtctgaaagaaacaagaatcctttgattatattggaatcttgcgacaagcagttacttggtcaagtttgctctaaaatacgttctttccgtaagcctgaaccgtataagggtaagggtattaagtttgttggcgaagaaattcgtagaaagtctggtaaatcagctggtgctaaataatcatttaaattgatattattatgacaacaaaaatagaaagacgaattaagatcaaatatagagtacgcaacaaaatttcaggtactactgaatgcccgcgtatgagtgtatttagaagtaacaagcaaatctatgttcagattatcgacgacttgtccggtaagacattggctgccgcttcttctttgggtatgactgaaaaaatgcctaagaaggaacaagctgctaaagtaggtgaactgattgcgaaaaaagctcaggaagcaggtattactactgttgttttcgaccgtaatggttacttgtatcatgggagagtaaaagaggtggctgatgctgcccgtaacggtggacttaaattttaatcattatggcaggacttaataatagagttaagattacaaacgatatagagctgaaagacagattggttgctattaatcgtgtaaccaaagtaaccaaaggtggtagaacttttagtttctctgctattgtggtagtaggaaacgaagaaggcatcatcggttggggccttggtaaagctggtgaagtaaccgctgctattgccaaaggtgttgaatctgcaaagaaaaacctgacaagagtgcctgtactgaaaggtacagttcctcacgaacagtctgcaaagttcggtggcgctgaagtatttattaaaccggcttctcacggtaccggtgttgttgctggcggtgcaatgcgtgccgtattggaaagtgttggtgtaacagacgttttggctaagtcaaaaggttcttccaacccgcacaacttggtaaaggctactatcttggcattgagtgaaatgcgcgatgctcgtatggttgcccagaacagaggagttagtatggaaaaagtatttagaggataaggaggaagaatatgtcgactataaagattaaacaagttaaaagtagaattggtgctcctgctgatcagaagagaactctcgatgcactggggcttcataagttgaatcgtgtggttgaacacgaatgtactccttcaattcttggaatggtggataaggttaaacacttggttaccattgttaagtaattatttgttgaatataaaacgaattacaatatgaacttaagtaatttaaaacctgcagagggatctactaaaacaagaaagagaattggacgtggtccgggttctggcttgggaggtacttctactagaggtcataaaggagctaaatcaagatctggatactctaagaaaatcggttttgaaggtggtcagatgcctcttcaacgtcgtgttcctaagtttggctttaaaaatatcaatcgtgtagagtataaggctatcaacttggatacaattcagaaattggctgaagcaaagaacttgcagactgtaggtatcagtgacttcattgctgctggtttcatttctgcaagccagttggtaaaagtattaggtaacggaactttgactgctaagttggatgtacaggcacatgcattttctaagactgctgttgctgccatcgaagctgctggtggacaagtagtaaaactctaattcaatgagaaaagctattgaaacattaaagaatatatggaaaattgaggatctgagacaacggatcctcattaccatattgtttgtggcaatctaccgttttggttcgtatgtcgttttgccggggatcaatccgtcaatgctgacacaattgcatcaacagacaagcgaaggtcttttagccttgttaaacatgttttccggaggagcattttccaatgcttctatttttgcattgggtatcatgccgtacatctctgcctccattgtgattcagctgctgggtattgcggttccgtatttccaaaaattgcagcgcgaaggtgagagtggtagaagaaaaatgaatcaatatactcgttatctgacgattcttattcttttggttcaggctccttcttatttgctcaatcttaagatgcaggctggtccttctttaaatgcttcattagattggactctgtttatgtttacttctaccattattttagcggctggaagtatgtttattttgtggcttggtgagagaattacggataagggtatcggtaatggtatttcgctgattatcatgattggtatcatcgcccgtctgccgcagtccttattccaggaattgatttcccgtatgacggacaagactggtggtctggtaatgttcctgattgagcttgttgtgttgctggttgttattgcattcgctattcttttggtgcagggaactagaaagattcctgttcaatatgcgaagaagattgtgggtaacaagcaatatggcggtgctagacagtatattcctttgaaggtgaatgctgctaacgtgatgcctatcatttttgctcaggctatcatgtttattcctatcactcttgttgggttctcgaatgtaaatgatgcaagcggtttcgtacgtgcattgactgatcatacaagcttttggtataatttgatttttgcagtgttgattatattgtttacgtatttctatactgcaattactattaatccgactcagatggctgaagatatgaagagaaacaatggttttattccgggtatcaagccaggaaagcaaactgccgagtatattgacgtgattatgtcacgtattactttgcctggttctttcttcttggccttggttgccattatgcctgcatttgccggcatattcggtgtgaaagctgagtttgctcaattctttggcggtacatctttgttaatccttgtgggtgtggtgcttgatactctccagcaggtagaaagtcatttgttaatgagacactatgacggtttgctgaaatccggacgtattaaaggccgcagtggtaatgtagctgcatattaatcttttttgaagaatgatatttcttaaaacagaagatgaaatagagctgctccgcaggagtaatttgcttgttggaaagacgttggctgagatagctaaggttataaggcccggagtgacaacaaaagagctggatagggtagcggaagagttcatcagagacaatggtgctgttccaacctttaaaggttttcctaatcaatatggcgatccgtttccagcttctatttgcacatctgtaaatgaccaagtggtacatggtattccgggagataatgtggtattgaaagacggtgatatcgtgtctgttgattgtggtacttacatgaatggcttttgtggcgactcagcttatacgttttgtgtaggtgaagttgacgaagaggtccgcaaattactgaaggttactaaagaagcattgtacatagggatacagaatgccgttcacggcaagcggttgggtgatatcggctatgcgatacagcagcactgcgaatctaattcttatggtgtggtgcgtgagtttgtgggtcacggaataggcaaggaaatgcatgaagatcctcaggtccccaattacggaaaacgtggttatgggacaatgctgaagaaaggcttgtgcattgccattgaaccgatgataactttaggtaaccgacaaatactcatggagcgtgatggctggacggtgaggacaaaagaccgcaagtgtgcagctcattttgaacatacgatagcagtcggtgctggtgaagctgatatattgtcatcattcgagttcattgaagaagtattaggagataaagcaatttaagaaattaatatggcaaagcaatctgcaatagaacaagatggagttatagttgaagcattgtctaatgcaatgtttcgtgttgaattagaaaacggacatgagattactgcacatatttccggtaagatgcggatgcattacatcaaaatcctgccaggggataaagtaagagtcgaaatgtctccttatgatttatcgaaaggaagaattgtatttagatataaataaaattaagatatgaaagtaagagcatccttaaagaaacgtacgccagagtgtaagatcgttagacgtaatggccgtttgtatgttattaacaagaaaaatcctaagtataaacaacgtcaaggataatattattatttttgcaaaaaaaataatttagtatatggctataagaatagttggtgtcgatttgcctcaaaacaagagaggtgaaattgcgttgacctatgtatatggtataggtcgtagtagttcagcaaaaattttggataaagcaggtgttgacagagacctgaaagtaaaagactggacggatgatcaggctgccaagattcgtgagatcattggtgcagagtataaggttgaaggtgatcttcgttctgaagttcaattgaacattaagcgtttaatggatatcggttgctatcgtggtgttcgtcatcgtattggtcttccagtaagaggtcagagcacaaagaacaatgcccgtactcgtaagggtagaaagaaaaccgttgctaataagaaaaaagctactaaataataattgttgatatggcaaaaaaaacagttgcagcaaaaaagagaaatgtgaaggttgatgctaatggacagttgcatgttcattcatcttttaacaacattattgtttctctggcaaacagcgaaggtcagatcatttcttggtcttctgccggaaagatgggttttagaggttcaaagaagaacactccctacgcagcacagatggctgctcaagattgtgctaagatagcatacgatcttggcttgagaaaggtaaaagcatatgtgaagggcccgggtaacggacgtgagtctgctattagaactatccacggtgcaggtatcgaggttactgaaatcattgacgtaactccgcttccgcacaatggttgtcgtcctccgaaaagacgtagagtttaaaatttacctttaatagaagtgagacttgattttgttattggattgtaaactttctctctgcaatcgcggctgcaacaaacccaagttcatgaataaacaattaaatatttaaaagaaatggctagatatactggaccaaaatcaagaatagcccgtaaattcggtgaaggtatctttggagcagataaagtattgtcaaagaagaactatcctcccggacagcacggtaattccagaaagagaaagacttctgaatacggtgttcaacttcgtgagaaacagaaggctaaatatacttatggcgttttggaaaaacaattccgcaacttgtttgagaaggctgagactgctaaaggtattactggtgaaatccttctccaattgttggaaggtcgccttgacaatatcgtattccgtttgggtattgctcctactcgcgcagctgctcgtcagttggtgagccacaagcacattactgtagacggtgaggttgtgaatattccttcttatgcagtaaaaccgggtcaggtgatcggtgttcgtgaaagatccaaatcattggaagttatcgctaactcactggctggttttaaccatagcaaatatccttggttggaatgggatgataactctaaggttggcaaattgctgcatgtacctgaaagagcagacattcctgaaaacattaaagagcatttgatcgtagaattgtattctaaataataattaatttcatggcgatattagcatttcaaaaacctgataaagtattaatgttggaagcggactctagattcggaaaattcgaatttcgtccgttggagcccggtttcggtattaccgtgggtaatgcactgcgccgcatcctgctttcttcattggaaggttttgctatcactactatcaagatagacggtgttgagcatgaattttccagtgttccgggggcaaaagaggatgttactaacattatcttgaatctgaaacaagtgagattcaagcaagtagttgaagaattcgagagtgagaaagtaagtattacggtcgagaattcaagtgaatttaaagcaggtgacataggtaagtatttgactggatttgaagtgttaaatcctgaattagttatttgtcatttagattcaaagtcaactatgcagatagatattacgatcaacaaaggtcgtggttatgttcctgctgacgaaaaccgcgaatattgcaccgatgtgaacgtaattcctatcgattctatttatactccgatacgtaatgtgaagtatcaggtagagaacttccgtgtagagcagaagaccgactacgagaaactggtacttgagattactaccgacggttccattcatccgaaagaagccctgaaagaagcagcaaagattctgatttatcacttcatgcttttctctgacgagaagattacgctggaaacaaatgatgctgacggcaatgaagagtttgatgaagaagtattgcacatgcgtcagttgctgaagaccaagctcgttgatatggatctctctgtacgtgccctcaactgtctgaaggctgcagatgtagagactcttggtgacttggtacaattcaacaagacggatttgctgaaattcagaaacttcggaaagaaatcgcttaccgagcttgatgatttgctggaaagtctgaatctgtcgtttggaactgatatttctaaatataaattagataaagaataaaaaatgagacataataagaaattcaaccatttgggtcgtactgcctctcatagaaacgctatgttggctaatatggcgtgttctttgattaagcacaaaagaatcactacgaccgttgcaaaggctaaagctctgaagaagtttgttgagcctttgattacaaaggctaaagacgatacgactaattcccgtcgtgttgtatttagcaatttgcaagacaagtatgctgtaactgaactgtttaaagaaatctctgtgaagattgctgatcgtccgggtggttacactcgtattatcaagactggtaaccgtttgggtgacaacgcagaaatgtgcttcattgaactcgttgactacaacgaaaatatggctaaggaaaaggttgccaagaaggctactcgtactcgccgttcaaagaaagccgctgctactgaagctgctcctgctgcagaaacatctgcaccggttgccgaagctcctgctgctgaggaagttaaagctgaataattcaactattctttttatatatagaagccgttccaatttgtttggaacggcttttttttcctataaatcatccaagaaacattaaaagatgtgtgcacaaaacaaattcgtaagtattcggccaactacaggtattaaacctttatatacaacaatagcgactgtcactatgaacctaatagtatcagccgctattgttttgttgaacccatatgttacaatttatatcagttacaagattcctccttttgccttgtcagtacacattccggatgtttcaacttccatttatgtggaagtagattcaaaagttcttcttgggttgcctttttgtgataaggcatttgtgcgataacatcgttcaggtataccctgggatttaccccgtgcgccttacatgtggccagcagagaacatatgacagacatattaaccgcagcttcgtgattaccacagaaaagaaaattttttctgctcagagtgatgggccgttggacattttccgccagattgttgtcccagtacaggcggccatcgtccagacatctcataatattatcccatttggtataggcatatgttatggccttgcctgtcaaagaacttggactgtatttaattccttctgtctccatccataccttcattgcctccatgattggcctggacagttcctgacgcgtctgtctgcgctcatcatatgacaggccggcttcgtcacactggcgttctattttatagacatgctgtatctgagtcagtgcatgttgcgccatctccctgttttcatccaaagcctgctcaaaatgacggcgtatatgcaccaggcagttgagtagccgcacgtcggggttggtcttgaaggctgtttcataacctgcaaaaccgtcacattgaagatatcccttgaagttatattgatttgccagggattcgatgaccgctccggcccgtgatcccccgtcgtaatggaagatgaccagtttctccatgactgatcttaccatccagagatattccttgtcggctctgtgtttttctctgttaatgaccggaactgtagtttcatccgcctgtacatagtcacaggagaagacttcccatttgagttcttcatacagaggcttaagcagttccacggttttcttgaaccagccgtccagtgtactttcggtaaggcctttcattccaagatggcggtattgctgtatctgacggtagaacgggacatgatattcatacttctgaagcagtatctcggtaagcaggctggtgtcagcaatgcacttgtcgaccggcatcagcggcatgggagctatctctacgcctttctgtccggctggaggaagcagggtactatccttgagagcatatttgggacggatgatcaccttgacgtaaagcattcccggcttgtgtttgacgacttttgttatctcttcgcctattctacggtataaagacaagtctacgcctttcggttctattgtatcggtttccaatacgggcaagtcctctatcattttgcggttctgacgatttcgttttacgtcttccaccgattccttctcaatcttttccacagcctcgtcccgcttttcttccgcctgctgccggagtccggaaaactcgtcggcaaagaggtctggcatattaggatcatatacgcgaagtttctctgatttacgaccaaagagctgacggttcagccatgcgacctgagccgtcaactccttgatacgttcctgcagattttttatctgttcggattgattcttattagtagtagacaatgaggctatagaggcattcagcccttctatcgtcttgagtaaaatttctttttcttccattgtctatacttcttttaatgatgtaaatatactaattaacagtgaattatgcaacaatatccaaagtttactcacgcaaaaaacatgttatacatggtattccttacgttcggctcttaaccgccggagcctctgttccgggttttcctgtattccttcaaccatcatcaccagatcgcgccactccatgggatagctgtttgatttgggatcatactccggcagcttgaagcgaccggcctccagacgttttacatacattaccatacctccgtcttcggcatgaaggagtttcattagtctgcggctggaaccgatgaagatgaagacatcaccgttcctcacttcactgttcattttctcatgtaccactccgcatagcgaactgatacccttgcgcatatctgtcctgccaggacacaggaagtagcgcatcgtgtcgttcaggttaaacatgaccgtctcgaagactttgggtaaatatttccttcagcaaatcttcagaaccgctcccgaagtgggcacgaagtccattgggaaacagcagcgcaacaccatgcggcaattgttcttcttgggaagactccgtaaatgcctgtttaaaactgataggagccaactcgtgtttgatactgctcctgtcaacggaacattttctacgccagtagtgataggttgaataacttacacctatctgttgaaggtacgacttcaacggcagctcgctttgttgcacctgcaattctaattcttcaaattcttgtctgttcataataattgaggtttgattgtattcactgccgcaaagctacaaccaaacctcaaagtgtaaaaggtgcatttcttcgaatgcttacacaaattcctgatagaaactgttatatttgcacatagatatggctaaattcttaagattcataggattcatggtgcttgcattggccttatggcagactgcaagcgatgcatttgcaaataaagcggcaagtggggggaatgttgtgagtgagaatactattgccgtacatgagcagactgatgcctatattgagatgcctcaattaccttatctgccagatgcagagctggcgggtatgggtggacaattacattcactgacgtactcccgtatacagcgtatttctaccacggaatatatattttctttaaaggactggattgacaaactggcccagcgagcggctgttttgtctctgcatcgtgagaaactctatgatgccactgcctattatcgttgccagccggtgtgcgaatattacattttcacactaaggcgtattctcatttagtgttttattgaattttcctttttcccttgtgtatggtcagactatgtgtttttgcaggggaatactgtattttctatttctaataaattcattaaaacatattataattatggcaactcaaactattgacgcaactctttttgcgtcttcacatcccgatattgtaaagcgtaccagtgtttcaggacttatcttttcagtagctatgctgctggtcggtgtttttatttttgtatccatttttgagatgagtgataaatcttccactctcagcatggttttgatggtgctgggtacggcattcgtcttgcttggcgtgttccgtctgttttggaaatcgaaggaagtggtctatttgccgacgggcagtgtgaccaaggaacgcagtgttttcttcgatttgaaatatttgggcaaacttacagatatgattgagaatgaacagctgaatggcgagactgaaataaaaagttgcggcagtggaaatgtgcgcatggatgtcattatttcgcaggataataaatttgcggctgtacagttgtatcagtttgtgccttacacgtatactccggtaacttccgtacgctactttacgggtagcgatgcggttgcagtgtctactttcctggagaaatgtaaagctgcataatcagtcaaagagttagacttggctttaactgtggtggggattagttggcaacggcaatccccatttttttcatcaggaagcaggcgttcatattctgggcgatacctgggcgcaagcggtaggagaatgtcagttcattgtctgtaatgtctgcttcaaagcgatagttgcggatatcatcggggaagagatcgatgagtgttcccagtagcagatcgtgggtggcaatgataccattggcctgcaaagtcatgaattgcttgataagggcaaaggatcctttctgcttgtccatggagttggtacctttcagaatttcgtcgaggatgatgaaaagctcctcaccagcctgtaacttgtctatgatgagtttcagacgtttgagttcggcaaagaagtaggactcgttgtcattcagtgaatccgaggtgcgcaggctggtgatgagccgggccgggcatatttccatttggcgggcacagacgggggcgccgatgcaggcaaggaggtaattgatgcccaccgtacgcagataggtgcttttccctgccatgttggcgccggtgacgatgatgaaaaacggtcgtttcaccatgtcgatgtcattgcggacacagcggtcacggttcatcagcggatggcccagggcttcggcacggagacgaaaggaggaaggggcattgatgggggcttccgtttcagaattgctttcttcttctttattcaggtttcctttcccctttctttccgcttgaactatctttgggtaaatatagtccggatgattataggcaaatgttgccagtgagttgagcgcatccatttgtccgatggcatcgagccacccgggcagttcagcggcatattgctctttccaggcttcaatgcgcatgatttgacgcagctcccagaagaagaggccgttcagaatgacgtacataaagacattgttgcgttggtcgagttcatccatgagcttgttcagcctgctgatggagtgggaggctttccgtttttctccgccaatctgttgttttatctctttgagcagggtggcttgtgcaggctgcttttccatgaggtggagcagggcggcgtaggtggagaggatttgcagttttttgccatagatggcctgcatcttggtgactttgccagtgaagccgaagccggagatgacgaagctggtccagatgatgccgtagatacttgcgggtagaattcctgccatgacgagtgcgaggcagatgaggttggctcccgtcaccagcaccggcaggaggcgcagtagttttcggttccggaagatgctcggactttccgcccattggcacagttctgtttcatcggcggcttttcctttgtacagcaggccgaggatacggaagcgctgacggaatttcagttccggagccagttcgctgacggcttcctggcggcggatgatttcttcctttctctcgagatgttttcccagccagtgggcgaggcggtgtttcccgggctgtgtgcaggtacggttgatgtactggaaaagggaatgcggaccgaaaacatccaaatcataggtgtagagatgggtggggtcgatgtatgcttcgccgtcatcgaaagaagacgtatcgtaatccagagcggcgagttcctgctcgttgatttccatcttcttttccagatagtccttgcgacgaaacagccggttgtggtatttcattaaaaataggaatggcagtagggtgatgagggcaatgcaggccagtataccccagctctcgctccagaaatagataattcctactactcctgccacaaacagcagcaggcgcaggctgccgatgcggtaaatcttctgttgtactttattcagttcttgtcttgcctcttctgccgtgttgcggtagacggcgctgattttatctatcgtatttatttgcttcatacatgttaagtttaaggcaaagatatacattttcaattgttttttccgcgattttttgtctacttccgataaaaaatgtacctttcgctcactaaaacaaagtttcagaaaagaggaggttgggatatgaagaagagttggttgtcaggcgttctgatgttgctggcggttttgccggcggcggcgcaacaggtaatgtattccaatctgaaagagttggtggagaaccgtggcgatacggttaccacgctgaagattgagaagcgtacaaagaaccagatttacctcatgggcggtgccgattatcgtattacggtagacgacaatcccggtctttgccgttatttgaagtcccgttgttatgctgtacgggtagatacctcgctttatgtcaattgccgtaagatgcgctataagcgttatcgcttcgggcagtggtatgcacctgccatgtggctcggcggaaaggtttacttctgtgcacagcctgtgggacaagcagccaccagtaccatgactcccgatgatgccacacgattgggcggtgaagtgggagacgccatcaatgcttcgggactggtgcatgcccgcgtctattacgaactgaatcccgaaactggaaagtccgagttcgtgggacgtgagcgaatgatgcaactgcttgccggatacccgacactgcacgccgaattcgagaaagaaacaagcgagtcggcagaggtcatcggcaagtatctgcgtgcactccgtccattaatcactaaccattaatcattaataagatgatattattgcaagacgtgcccgatgggtacgaatactgctttgcgggtaacgggaagtgccccaaagcctcttcctgcttgcgggcgatagcggcacaactgttgtccgagagtgaaggcccccagccacagtccgttcgtgcggtgaatcctttttatgtcggcagcttgtccgggtcctccacttgtgcccgttaccgctccagcgagcagctgcactatgcccgcggtatgacgcaccttttcaacgaagtacccaccaagctgcttttcaccgtgcgccatcgcgtgatgggatgcttctcttgtgaacgctattactatcattgccgcaagggcgagcgccctatctctcccgaagaacagcaacggatagcccgggtattcaaggcagtaggcataagcaccaagcctaagttcgaccgctacgagtatgcggtagcttggtgaccggctgcaaagtcattgcacgccttttgcagcgtcactgcaaacccgttgcagtcgcgctgcaaagcagttgcagtatcactgcaaataggtatgcagtggcactgcaaaaagcatgcactcactttgcagtgagaagtctctgttgttcacgttgttaaagtatgaatacaatgaggccttatcctccttttttggcccgctgtttacagattgcagaagaaggatacgaataccggtacactcatatcaattaatattccgtggaatatagcgataggaatcacatcctttccggaatattgggtgatggagggtagaagtacatccatcgaattgacccctgccgccgatataggtgccagtttgccgaaatatttccggatgagcggtgcacccagcaaagccatcatttcacggaagatattggcaagcagggcgatggtgcccagttccgtggcgagttgcagacctatggaaggttccttgaattgcgtaatcagaatggaggaaagcgaataataagcaaatccgctacccaccgccatgcagtcgaacacactccattggctcaacagcagactggcgaaggcggagaacaacagtgttcccacaatggtggccatcggcaccaaaagcattttgggccgcagactcttgaccagctccttcaattgcttgttgctcccgatgccgatgcccacctggaacatcaatgcatagagcacatacatggataagtcgtgcaggtcgaactgaaaatcattggctactcccatcaggcagccggcacagaaaaatgcaacaaccatcaaacttcccttcatctcttctctcctttcttaaaaaataggtgaaacaccatcagtgaggctagcatgctgcctgtaatgctcagtgaggccagtacggcggcctgccacccgaatcttcccagattgtcaacaatcagacggttggaaccgatggatacaccgagtacaaagagcagcagtaagatggtgagcgaggcgcttttctccactttttgcaacatctgtacattacgcattaggtatccgataccgattcctataaacatgatggatataattgtaaacataagtttttttcttttttgggtgaatacataggttagtccggtttttccgaacggaaactccatacacggcatctctccctccttttctcggtaagggaagtgcaaaatagtaagatgcaaattgcaggatagttaaatgaatccgctgaaccaatgtacgtgcactatgaagtggccgcataaggtcttgttgccccatgcagcattgcgcgtattgtatcttgtagttaagtactggttcatatcgtttttgaatttcggtgcaaaggtaatgctagtttgaataatttccaaataaatattcataatttgtttcgtgaaaagattctttgatgcgtggaagttcccgtaaaaacattatttttgcaagagaatagaggaaaaacaagagctcctttgtttagaaatatagttttaaaaagagaagagatatgaaaagattgagagatttaactgctgttcttggcatggttgctttggctgcttgcaacaatgcctccattgaaggctcctgggtggagccggttccgggaatgcccggcatgcaacaaggtttcgttcttgatagggacggaagcgcctcttccattaacatggccaccttgaaatatgaggcatggaaaaaagtaggaaaccggttgttactttcaggtaccagcatcggcaatcaccagaatatttctttcacggatacgctgacaatagaaaaactgacgcaggacagcctgattctcaaaagaggagagttgctcttgaaatatgccaggaacaatgaagctctgaatcaaaaaacaatacctgctgcggtgcttacccctgccaagaaacttctgtcggtaagaggcgagctggtcatcggccatgaggtgcgttccttcaaagccgaaggagattctgccgattattggattgtggatgagaccggagaactcatgcaaaaatatgatgatatgacgaaaggagttaaaaacggaaaaccggtatacgtagagttggaagtaatcgatatgggcaaagccgatgacggatttgccgccgattatgaaggtgtctatcagataatgaaaatcaataaaatggctttaaaatagaaatcctctttgttggtttctgactaaaagataaataatcccggcattccattgcgaatgtcgggatttatttctatattgcggcaaatatagccctcgtgggctgacactttgtaaatccttaatctttataggacatggagataaccttaagtaaaacattgccttcctatccttcctttgtcgagggtatccggcgggcacccgaccgtggctacacccttacccctgcgcagacggctacggcattgaagaacgctttgcgctacatccccaaagagctgcacgaaaccctcgctccggagttcatggaagaactgcgtacacgtggacgtatctatggctaccgctaccgcccgcagggcgacctcaaagcgaaacccatcgatgagtacaaagggaactgtattgaaggcaaggccttccaggtgatgattgacaataatctttgtttcgacatcgccctttatccgtatgaattagttacctatggtgagacgggacaggtctgtcagaactggatgcaataccggctcatcaagcagtacctcgaagtgttgacgcgcgagcagacactggttatcgaaagcgggcatccgttgggactgttcaaatccaagcccgaagcgccccgtgtcatcattaccaatgcgctgatggtggggctctatgataatcagaaggactggcacaccgctatgcagatgggcgttgccaactacggccagatgactgccggaggctggatgtacatcggtccgcagggcattgtgcacggcacctttaatacgctgctgaatgcgggccgtctgaagctgggcattccgcaggatggtgatttgcgcggacgcttgtttgtttcttccggtctgggaggcatgagcggtgcgcagcccaaagctgccgagatggcaggggcggcggcaatcattgccgaggtggatgcttcccgcatcgaaacccgccatacccagggttgggtgggacacgttacggattctctggaagaagccttctcgctggctcaaaaagcgatggatgagtgccgcccggtttctgtggcctatcacggcaatgtcgtcgatttgctggaatatgcggtgcagaagcagttgcacatagatttactttctgaccagacttcctgccatgccacctacgagggcggttactgtcccgtcggactgacgtttgagcagcgtacccgtatgctacatgaaaatccgtcggagttccggtgcctggtgaatgtttccttggagcgtcatttcaaggctataaagaggctggtggaacacggtacatacttcttcgattatgggaactccttcatgaaagccgtctacgatgccggtgtgagcgaaattgcgcgagacggggacgataagaacggcttcattttccccagctatgtggaagacattatgggaccggaattgtttgattatggttatggtccgttccgctgggtgtgtctcagtggaaaacatgaagacttggtgaagaccgaccgtgcggcgatggaatgtatcgaccctacacgtcgcgggcaagatttggataactacaattggattcgtgatgcggagaagaacaatctggtagtcggcacgcaggctcgtattctctatcaggatgccgtgggacgcatgaatatagctttgcgcttcaatgaaatggtgcgtaagggagaggtcggccccatcatgttgggacgcgaccatcacgatgtcagcggtacagactctccattccgtgaaacatccaatatcaaggacggcagtaatgtcatggcagatatggcggtacagtgttttgccggaaactgtgcgcgtggcatgagcttggtggccttgcacaatggaggtggcgtaggtatcggaaaagccatcaacggcggtttcggcatggtgtgcgacggtagtgagcgggtagacgaaatcttgcgttccgccatgctgtgggatgtgatgggtggtgtggcacgccgttcgtgggcgcgtaaccctcatgccatggagacgagtgaagagtttaaccgtacgcatgcagatggctatcatatcacgatgccgtatgtggcggatgaggatttgattagaagcatgtgtatattctctcattagcatattactcacattagcatattagaatattatggacagaattatggaatgcgtccccaatttcagtgaagggcgcgatttgcaaaagatagataagatagtggctccttttcggagcaaacaaggtgtgaaactgttggattacagcaacgatgaagaccataaccgcctcgtggtgaccgtagtgggtgagcctgaaccgcttcgtgatgctgtgctcgaagctatcggcgtagcggtagagctgatagatctcaatcaccatcagggacagcaccctcgtatgggtgctgtagatgtagtaccttttatccccatccggaatgtgacgatggaagaagctgttgccctctccaaagaggtgggcgaggaggttgcaaaacgttacaatcttcctgtcttcttatatgaaaagtctgcttctgcccctcatcgggagaatctggccgctgtccgtaaaggggagttcgaaggtatggccgagaagataaagcaaccggaatggcatcccgactttggatcggctgaacgtcatcccaccgcaggcacagtagctatcggtgcccgcatgcctttggtggcctataacatcaacctcaatactcccagtctggagatagcccatgacatcgctaagaaaatccgtttcatcggcggcggactgcgttattgcaaggcaatgggagtggagttgaaagatcgcggcatcacgcaggtatccatcaacatgacggactatacccgcaccgccctctaccgtgctttcgaactggtgcgtgtggaagcccgccgctacggtgtcagcattgtgggcagtgagattatcggtctggtgccgatggaggccttgatagatacagcgtcctactatctgggattggagaacttctccatggagcaagttttagaagcacgaatgtaaccgaattaaatagtactaacttaattcccctccttacgggggaggggttaggggagaggctttatgacagagaaccttattatattcaatgcccgtgtcgtgacccccctcggtttttccgcccgtcgcggcagcgagatggagcaactgagcatcatcgacaatgctacggtggaagtgaccgacggtgtcatcacctacgtcggtcccaaccgtggagaggagcgtgatggctattatcagcactactggcattacaatgcccgcggcaagtgtctgctgcccggctttgtggactcacacacacattttgtgtttggtggcgagcgtgccgaggagttctcctggcgtttgaagggagagagttacatgtccatcatggaacgtggaggaggcatcgtgagtacggtgaaggctacccgtgcatgcaatttcatccagctgcgcagcaaggcggagggctttctgaagcagatgagtgctatgggagtgactaccgtagagggaaagagcggctacggtctggacaaggaaaccgaactcctgcagcttcgggtgatgcgtagccttaataatgacgagcacaagcgtgtagacgttgtctccacttttctcggcgcacatgctgtgcctgcagaatacaacgggcggacggacgaatacgtggactacattatccgcgaagtgatgcccgtagtggttcataataatttggcagagttctgcgatgtcttctgtgagcagggtgttttctccatcgaacagtctcgtcgccttttgctagcagccaaggaaatgggacttgccttgaaactccatgccgatgaaattgtaccattaggtggtgctggactggctgctgaactttctgccgtctctgccgaccatctgctgcatgcttcggatgcggacatccgcgccatggccaataaagaagttgtggcgacccttcttccgctgacagcctttgctttgaaggaaccctatgcccgtggacgcgaaatgattgatgccggttgtgccgtggctcttgccaccgacctcaatccgggcagttgtttctccggttccatccccctgacatttgccttggcgtgcatttatatgaaaatgagtgttgaagaggccatcactgccctgaccttgaacggtgcagccgccttgaaccgtgcggacagcattggtagtatcgaggtgggcaaaaaaggggattttgtagtcctcgatacggacaattatcattttttgccctattacgtcgggatgaattgtgtcaataccaccgtgaagaacggagttctttatccgggactttagagctccttgaacattaatatttaatccttaataatttattaccatgttagttgatttgacagtaaaggaatttttgaataaagtggcgggtagtgatcccgtccccggtggcggtagtattgccgctttgaacggtgccattgcttctgctcttgccgctatggttgccaacctcaccatcggcaagaaaggttatgaacttcacgaagagctgatgcgccatgtctccggagttgccttgcagcagaagggagcttttgtggaagatatagaccgcgactctgaggcctacaacaaggtgtttgcctgcttcaagatgccgaaagctacggatgaggaaaaagcggcgcgcagtgctgccattcaggaggctaccaagtttgctgcccttgttcccatgcaggtggcacgcaatgcgtatgagttgatgacagtcatcatggatatagcccgcatgggcaatcgcaatgccgttacggatgcttgtgtagccatgatgtctgcccgttcggctgtgctgggcgcactgatgaatgtacgcatcaacctgggttcgttgaaggacaaggagtttgtgtccaagctccaaagtgaagccgatgaattggaacacttggcttgtgcgaaagaaaaggaattgttggacgaaatcaatcaagagctgaaagtatgaacaatgtctattacgtaggttccggtgagctgaccttcgacctcatcgaacgcatcattaatgaaaacttgaaactggagctggctccggaagccaagctgcggatacagaagtgccgcgattatctggacaagaagattgcggagtcggaagaacccttgtatggcattaccaccggtttcggctcgttgtgcagcaagagcatttcgtcggacgagctgggtaccttgcaggagaatctcatcaagagccatgcttgcagtgtgggcgaggagatacgtcccgtcatcatcaagctgatgatgttgctcaaggcgcatgccctctctttggggcatagcggtgtgcaggttattaccgtgcagcgtatcctcgactttttcaataacgacgtgatgcctattgtgtatgaccgtggttcactgggcgcctccggcgatctggctcctctggccaacctcttcctgccgcttatcggtgtgggcgatgtttattataaaggaaagaagcgcgaggctatcagcgtgctcgacgagttcggctgggaaccggtgaagctgatgagtaaagagggattggcattactcaacggcacccagtttatgagtgccaacggtgtctttgccattctcaaagcctttcgtctctccaagaaagccgacttgattgccgccctttccctggaagctttcgacggacgtatcgatcccttcatggactgtatccagcagattcgtccacacaagggacagatagaaacgggtgccaacttccgcaagctattggaaggcagcgagctggtagctcgtcccaagcagcatgtgcaagacccttattcgttccgttgcatccctcaggtgcatggggcaacgaaagacgccatccgttacgtgtcttccgttctgctgacggaaatcaattccgtgactgacaatcccactatcttccccgatgaggaccgtatcatttcgggcggtaacttccacggccagccgcttgccatctcctacgactttctcggcatcgccctggcagaactgggcaatatatccgagcggcgcatcgcccagcttatcatggggttgcgcggacttccggaattccttgttgccaatccaggtctgaactccggtttcatgattccgcaatatgccgccgcatctatggtgagccagaacaaaatgtactgctatgccgccagcagcgactccatcgtttcctccaacgggcaggaagaccacgtcagcatgggtgccaatgcagctactaagctttatcgcattatggataatctggagcatatccttgccatcgaactgatgaatgccgctcagggcattgacttccgccgtccggcaaagacttctcccgttttggagcgtttcctgcacgaataccgcaaggaagttccctttgtgaaggaggacatcgtgatgtataaggaaatccataagacagtcgctttcctcaaccggacaaagtttgattattaggaacttcccaataaatctgccagaaacataataattattaatctgttaacaataagaaaggaaacttaattggcgaattgagttttctttctatatttgtctcgttttattccgataatgaataaaaatagttttagtttagaaagggaagaaaaatgggcgaacacacgaagcattcaacatcacgggtggaactaagggaacgtatcattctggccgctgtagaattatttacaacaaatggaataaaaagtatcacgatggatgagattgcagcatctttgggtatctctaagcgcactctttacgaagtttttccggataaggaaaccttgctggaagaatgtatcctgaagtcccagaaggatggtgatatttttgtgaaagaagtcatagagacttccaacaacgtattggaagttttgttgagatgttatcagtggagcatagagcgttttcatgccacgaacaagaagttttttgaggatatcaagaaatatcccaaggcttatcagttgatgaagaacaaccggaaccggagctcggaagataccgtgaactttttcaaagagggcgtgaagcaaggcattttccgtgatgatgtgaattttgctattatcaatctgcttgtgcgcgaccagctcgatttgctgatgaattcggacatctgcaatgagtattctttccttgaagtgtacgaatctatcatgttcactttcttgcgcggtatctctacggagaagggtgcccgtgtcctggaggactttatctgcgaatatcgcaagaatcaggtaaagccggatgaaacgaaggagtagttttaataaataatctatttttgatttatgaagatgcagagattttgggtaggcagagcactactgttggcagttgctgtgctgtatgccggcggctatgtgcgcgcacaagagacaaaggataccctgaccctgacccttgaccgtgccttggagattgctttaagcgacaatcctaccataaaggtggcggaggaagaaattgctttgaagaaagtgactcacaaggaaacctggcagaacttgcttccgcaggcaagcattgacggtacgtggaatcataccatcagtgcggcacagatgaatcttggcggacagtcgttcaagatgggtatggacaattcgaatacggtaagcggggtgctgaatatcagtttgcccatattcgcccctagcgtatataaggccatgtcgatgacgaagacagacattgaactggctgtggaaaagtcacgggcttctaagctggacttggtgaaccaggtaactaagggttactatcagctgatgctgacgcaagactcctacgatgtgttgcagaagagctataagctggcagaagacaactacaacattgtcaatgccaagtatcagcagggtgccgtcagtgagttcgataaaatcagtgccgaggtgcagatgcgcagcattaagccgaatgtgatttcggcgggtaatgccgtgacgttgtccaagttgcagttgaaggtactgatgggagtaacggccgatgtggatatagagattgccgacaatctcggcaactatgagacggagctgtttgccaatgaactgaatcagcccgctgccaatctgaacaataatacgacgatgaagcagttggacttgaaccggaagatgctcaatcagaacatcaagtcactccgtaccaacttcatgcctactttgggtatgaattattcttaccaataccagtcactctacaacgaggactggaacatcctcgattataattggagcggaagttccgcactgatgtttacgctgagcattcctttgtataaggcaagcaatttcaccaagctcaagtccaaccgtattcagatacgtcagttggagcagaaccgtctggacacagagcgcaagctgaacatgcagattaccagctatcagaacaatatggctgccagttccgagcaggttgtcagcaaccgcgagaatgtgatgcaggcacagaaagctgtgcagattgccggtaaacgctatgaggtaggtaaaggtacggtgttggagctgaacacttcgcaagtgcagcttacggaggctgaactgacttacaatcagtccatctatgattatctggttgcgaaggctgaccttgaccaagtactgggaaaggattatattgcagggaacgaagaatgaagaactaagaatgaagaatagaaataaaaacaacgatatgaaaaaaggttttcaatggatggtcctgctggtggttgccatgctgggggcatgtagcggaggtagtgataaagctgctgctgagaaggtggacgaaaagccgagggtgaaactggccgaggtatcgtcccgtcccgtggaacagattcaggaatacaccgctacggtggaagccgaagtaaaaaacaatattgctccctcttctccggtgcgtatagaccgcatctttgtggaggtgggcgaccgcgtgtcgaaaggccagaagctggtcagcatggatgctgccaatctgaagcagataaaatatcagctggacaaccagcagatagagttcaagcgtattgacgagttgtataaggtaggcggtgcctccaaatcggagtgggatgccgccaagatgaatctcgacatccgtgagacttcctataagaatctcttggagaacacctcgttgctcagtcccattaatggagtggtgacggcacgtaattacgataacggagatatgtatggcggtggagagccggtactggtagtggagcaaatcactccggtaaaactatacatcaacgtatccgaaggctactttaccaaagtgaagaagggcgctcccgtatctgtgaaagtggatgtctatggtgacgaggagttcgaaggcaaaatcagccttgtttatcctaccatcaacccggctacccgtactttcccggtagagatacagcttgttaaccgtgaccagcgtgtacgtccgggaatgtttgcccgtgccacgctgaatttcggaatacgggaccacgtggtcgttcccgacctggccattgtgaagcgtgccggttcaggcgaccgctatgtctatgtctacaaggacggcaaggtgtcttataataaggtagaacttggccgtcgtatggatacggagtatgagttgatttccggtgtagacaataactctcaagttgttattgccgggcagtctaaattagccgatggtgtggaagttgaggtagaaaaataatatggtaatgtggtaatgtgataatatgctaatgtgccgatgtagctacattgcgcagccaattagcatattagcacattggcaaattaaagaattaatttatgagtttatacgaaggagcggttaagaaaccgattatgacctcgctctgcttcctggcagtggctatatttggtctgttctctctgtcgaaattgccggtagacctttatccggatatcgagaccaacaccattatggtgatgactacctatcagggtgccagtgcctcggacattgagaacaacgtgactcgtccgttggaaaacgtgctgaactcggtcagtaatctgaagcatatcacctcccgttcgtcggaaaatatttctgtaattacgctggagtttgagtatggatatgacatagacgtgctgacgaacgacgtgcgtgataaactggacatggtgagctccatgctgcccgatgaggtcgaaactcccatcatcttcaagttcagtacggatatgattcctatcctgctgctctccgtgcaggcagaggagagccagccggctctttataaaatattggatgacaacgtggcgaatcccttggcgcgtgtgccaggtgtgggtacggtgtctatttcgggtgcccccaaacgtgaggtcaatgtatattgcgaccccaataaattggatgcctacagcctctcagtagaaactatcagctctattatcagtgccgaaaaccggaatacgccgggcggtacgttcgatgtgggtaacaatacctattcgctgcgtgtggaaggtgagttcaaggatcccaaagagatggagaacatcgtggtaggtacgcataacggtgcttccgtctatctgcgcgatgtggcaaaagttgtggactctgtggaggaacgtgcacagaagacgtatagcaacggtgtgcagggcgccatgattgtggtgcagaaacaatcgggtgccaattctgtagccatttcgcagaagataattgatatgttgccgcagttgcagaagtcactgccgagcgatgtgaagctggggatcattgtcaatacttccgaaaacattctgaatacgatagacagcttggaggaaaccattatgtacgctatgctgttcgttatcttggtggtgttcgtttttttggggcgttggcgtgccacggtcattatttgtatcaccataccgatgtcattggttgcctcgttcatctatctgggtatcatcgacggtggttcactgaatatcatttcgctctcttgtctttccattgctattggtaatgtggtggacgacgccattgtggtactcgagaatgtaacgacccatattgaacggggttccgaaccgaagcaggcagcgatacatgccacgaacgaggtggccatctccgtaattgcatctacgctgactatgattgcggtattcttcccattgacgatggtaagtggcatgtccggtgtgctattccgtcagttgggatggatgatgtgtgtgattatgacggtttccacagtttcagccttgtcattcactccgatgatgtgtgcgcagcttctgcgtttgcagaaaaagcagagtaagatgttccttacgctctatacgccgattcagcgtgcgctggacggtcttgacgtgtggtaccagaaccggttgaactgggctgtgcgccatcgtctgacggttatggcaggctgtgccgcattttttgtggcaagtctgttctgtgccaagtacataggtaccgagttcttcccggcagcagacaatagccgcatcggtatcaaccttcagttgcccatcggggcccgtgtggaacgtgcggaagcgttggcttcggaactgacaaacaagtggatgacgcgctacggagatatgatgaaagtttgcaactacactgtggggcaggcggactctgacaatacgtttgcttccatgcaggacaacggtagtcatatcattagtttcaatatcagtctggtgagtccgggagaccgtgacgtgacactggaaaccgtttgcgacgaaatgcgtgaggacttgaaggggtatcccgaattggacaaggcgcaggttattctgggcggtagcacaggcggcatgagcgcccaggcaagtgccgactttgaggtttatggttacgacttcaccgcgacggacaaagtgtcagccgaactgaaagagaaattgttgcaggtgaaaggtgtgagtgaagtgaatatcagccgtcaggattatcagcccgaatatcaggtggactttgaccgtgagaagctggcattgcatggcttgaatctttctactgcctccaactatctgcgtaatcgtgtaaatggtgctttggcatcttattatcgcgaagatggtgacgagtacgacatccgtgtgcgttacgctcccgaattccgtacaaagattgaagatttggagaacatccttatttatacgccttccggtgagggtatccgcgtgaaagacctcggcaaagtagtcgagcgttctgctcctcctaccatcgaacgtaaagaccgtgagcgtattgttactgtatctgcggttatttcgggagcacctttgggcgatgtggtggccaatggtaatgctataattgataagatggacctaccaagtggtgtttctatccagatttcgggttcgtatgaggaccaacaggattcattctccgacttgggaacgctggctgtattgattgttattctcgtattcattgtgatggcagctcagtttgagtctttgagttatccgttcatcatcatgttttccattccatttgcattcagcggtgtgttgatggcattattctttacgggaaccaatttgaatgtgatgtcgcttttgggtggaatcatgttgattggtattgtggtgaagaacggtatcgtactcatcgactacatcacgctttgccgcgaacgtggtcaagcggtgcttcactctgtagtcacggcaggtcgcagccgtttgcgtccggtattaatgactacactgaccactatcctcggtatggtgccgatggctgtagggcagggtgaaggtgccgagatgtggcgtccgttgggggttgccgtaattggcggtctgacggtatctaccattctgacattgattcttgtccctgtactctattgctcgtttgcaggtgttggtattcggcgcacacgtaagaagattaagaaagaccgtgagctgaatgattattaccagttgcataaggagaagatgacgaaaccacgtaaacaatgattaatcattatccgttaatcattaaacattaatcactaaacattatatagcgtgaaatcagtatttataacattcgaccaagcgttctttgaacgtatcatggcattgcttgatcgccacaactgccgcggcttcagctattggcagcaagtacaggggcgtggcagtaagacgggagaaccgcactatggcagccatgcctggcccagtatgtgttccgccatcatcactatcatagatgaggctaaggtggctccgttgctcgaagcgctccatcggatggacaaggagaccgagcaactcggactccgtgcttttgtttggaatatcgaacagaccatttaatcgggtctgctctgtctataaccattatccccagagaaaaaatcttgtttcttcggggataattcttttttgtccggagagatttttcaacctatatctatatctttgcgtccacattaggtatggaaaagaattcattgaaatatacgggtctgttggcgtttatcgtatggggtgcattgttgctgatgcatctgttgccaagtattacgatgggtagccgtgtgctgaggcgtgtggatatcttgggggacgtgcgtcgtccttccaagccggtgagtgagccggacagcctgctgcctccgcccccgaaggtgaagcccgcctttgtggacacctgccgtgcgggcatgacgtgcattgaagattatagtgattctaccatgcgtggcatgacgcggttctatcaggcactcgacgagcttgccaaagcaccccgtccggttcgtatcgcctacttcggcgactcctttatcgaagcggatattctgacggctgatttacgcgagatgcttcagcagaaatatggcggttgcggagtaggttttgtcaccattacgtccatgaccagtggcttccgccctacagtgcgtcattccttcagcggatgggagagtcattctgtcatggactccgtgttctttgaccgtagcaagctgggagtctccggacattactttattccgaataccggtgcttatgtggaactgcgggggcagaagaactatgcctcccgtctggacacctgccagcgtgccagtatttttttctataaccgtggcacaaccaccctttctgtccgcgtcaatcgtggcgaagcaactactgagacttttgagccgattgatgatttgcaggagatgacggtagagggaaatatcggttctgtccgttggacggtggaaagtgcggactccaccttgttttatggccttgccatggacggtacttccggcattgtgctggataacttctcactgcgtggcagctccggcctctccctccgttctgttcccgtgtggatgatgcgcgagttcaacgaacagcgtccttacgatttgataatcctgcagtacggactgaatgtggctacagagcgcggacggaattacgacaagtacattgccggcatgcagacaacggtgcagcatctcaaggaggcctttccgcaagcagccatcctcatagtcagcgtgggcgatagggactataagaccgaagaaggagagctgcgtaccatgcctggcatcaagaatctggttcgttatcagcagaatctggcagcggatgaggctgtcgctttctggaacatgttcgaggccatgggtggggaaggcagcatggcagacatggtgcatgccaagccgtcactggccaattatgattatacgcacatcaacttccgtggtggaaagcatcttgcgggattactttatgagtctttgatttatggcaaggaacagtatgacagaaggagggcctactatgaagaggagccataaggaggatttacgattgtacgatttacgatgtatgatttgctgcgcggtgctggtactgattgcggcgatacggccgctccatgcacaagacatactgccaggcagcctttcgtgtcataccggtggagcggattgtgatactctctgcctctattcccaacgtacggatacggtgtctgtccctttgataacttttcccgccgcattccggcaaatgaaggagaatgtacttaccgacagtctgggtattcttaatcctttctgggagaagttgcgtctgtcccggctgggcgcttccgctgatacgcttcgcatcgtacatgtgggcgacagccatatacgcggccatatcttcccccgtaccaccggtgcgttgatgcaggacactttcggggcagtctcttataccgatgtaggtatcaacggtgcattttgtactactttcacccgtccggaccgtattgctgatattgcggctctacatcccgacctgcttattctttccttcgggacgaacgaaagccataaccgccgttacaatacaatgttgcactatcgccagatggatgaccttgtacgcatgcttcgcgagaaactgccgaatgtaccgatgttgatgaccactcctccgggctcttacgagagtttccggcagcgtcgccgtcgtcggacctataagattaatccgcgtactgccgttgccgtgcagaccatccgccgctatgccgatgaaaacggattggcggtatgggacatgtacgaaatacttggcggtacccaccgtgcctgcctcaactggcaggaagccggattgatgcgtccggaccatgtacattatttgccggacggttaccgcctgcaaggcgagctgttctgccaggccttgttaaaagcttataacgattatgtggaatattgaagaatttttatccggattgaatatagacttggaccgtttgcgcgatgtcttcacttatgacccgcaagccccgatgatattcagcagtggtattttcctctggctgtttgtcgcttttatattggtttatctgttgttgcaacgccggacgacggcgcgtttgctgtttgtcaccttgttttcctattacttctattataaaagtagtggcacttattttttcctgcttggactggtgacggtctgtgactttttcattgcacgtttgatggcacgcgaggctattccctggctacgtaaggcatgggttgtgttgagtctgttcatcaatttgggattgttgtgttacttcaagtacaccaatttcctgggcgaaacttttgcctcgctgacgggaggaacgttcacggcaatggatattttccttccggtgggcatctcttttttcacttttcagtcgttgagctatacgatagatgtgtatcgtcgccagataacgcctctgggcagtttattggattatgctttttatgtttccttctttccccagttggtggcggggcctattgtacgtgcccgtgatttcattccgcaaatccgccgtccactgtttgtctccagggagatgttcgggcgtggaatcttcctcatcgtgagtggactcttcaagaaagcggtcatatcggactatatcagcgtcaacttcgtagagcgtatctttgataatcctactctttattcgggggtggagaatctgatgggtgtctatggctatgccttgcagatttattgcgacttctccggttacagtgatatggctattggcattgccttgttgctgggtttccatttcaatatcaacttcgattctccctataagtccgcttccattacggagttctggaggcggtggcacatctcgctttccagttggttgcgcgactatctttatatctctttgggaggcaaccggaaggggaaaatccgccagtacgccaatctcatcattaccatgttcctgggtggcttgtggcatggagcttcgtggaattttgtcctttgggggatgacgcacggtgttgcgcttgcagcccacaagtgctggatgacgctcaccggacataagaaaggtgcggaaagccgtggcattcgccggttcttcggggtgcttattactttccattttgtttgtttctgctggatattcttccgtaatgcggagttttccacatcaatggatatgctgaggcagatattcactactttccgtccgcaactcttcccgcagttggtggcaggctattgggaagtgttcgcattgatggcattgggatattttctgcattttgtgcccgacagttgggaacgtgcctgcacaaaaacagtaatccgccttcccttgttgggaaaggcggtactggtgcttgctgtaatctatctggtcattcagatgaaaagttcggagatacagccgtttatttatttccagttctgattacttcttctcggtagcagtggagtctgcctgctgtcggaagggttcccggtagttgagcccgtctctccggtagaggctgatgagtccggccagtcgggtagtgaagtttgtataatctttcttttcctgttgtgtccattgtacttcggcaagggcggccatacgggggagaaccatatactctacctgctcgctggtcgggatgtattctgtccaaaggttggcttgtgcgccgagtatgtgcttggcttgttcttcggtcagtgaggcggtaggattcagactgtatactttttccaatgggacaaagcctccgatggcaaatggttcgtgccgggtatcctcactttggtaataatcaaagtagcaatagtcgttgggtgtcattatcacgtcgtgtcccagttgggccgctttgattcctcctgccgagccacgccatgacataacagttgcgttaggagcgacgtcgccttccagaatctcatcccagccgataatccggcgtcctttactattgaggaacttttcgatacgtgtcatgcaataactctgcagacggtcttcggctgtatggttcttgtcggatttcaatttttcggttctgatacgcgcctggcatttgggacacttttcccaacgggtgcggggagcttcgtcaccgccgatgtggatgtatttggaagggaatatatcaatgatttcggccatgacatcttcgaggaactgcatggacttttcgttgccgatgcacagcacatcttcgaatactccccaacgtggacacacttcatacggtccaccggtgcatcccatttcgggataggcggccagtgcggcaagcatgtgtccgggcaggtctacttcggggatgaccgtgatatagcgctcctcggcatattttacgatttccttggcttgttcctgcgtatagaaaccgccatatcgggtattgtcatactcttcggtattccggccgatgacggtacggtcgcgccaggcgccaatttccgtcagcttgggatatttctttatttctattctccagccttggtcttcggtgaggtgccagtgaaaggtattcatattgtgaagtgccagtaaatctatgtatttcttgatgaactcaatggggaagaagtggcggcccacatcgaggtgcatgcctcggtagctgaagcggggttcatcctggatgctgccggcaggcaataggatagaggtggctttggtttcggcagggattgatttacgcagggtttgtataccgtagaacactccgttctcggtctggccgtttagggtcacccggtcggctttgacggtcagcacatagccttcccggttgcggatagccggatccagtcctaatgtgatggcgtctttgggcgcttcgctccccggggcaagggcttctgtctggagggtgtggccggtggactggctgatgtattcagccagaaactcagcattgcgtttcaaaagttcattgttttcggggtaggcgatgatggtaccggcattcaggttgaagggagattcctgactcaaggcaacttcctggggcagggggatgacttgatagttggctgttgtttctaccccgcatgaagagcaggccaggacgagggtacctgcaaggagcatgtgtgtaagttttctcatggcattgaattgattaaattagtgtctgacaaatatacgcaaaaaatactaaagaggtagaggataagggggatttatgtatgcttatgcttcagttctctttgctctatactccttgagtgacattcccgtgtgtttcttgaaatatcgtccgaaaaaaaactggtcgggaaaacggtatttgtcggcaatctctttcagtattagctgtcgccggcttggtactgaccagttgcggcatctataccaaataccagcgcccggaggacatcacaaccgatggactttatgaacacgatttggacgggcaaagtttggatagcctgagtctgtttgcggcatcggacactgtctccatcgcctccctttcctggctcgagctttttacggacacgcaattatagtcgctcatcgagcaaatcttgcaaggcaacaccgacttgctttccgcccagcaatgcatcagggaggcagaagccacgctgatgtcggccaaactttcgtacctgtcttcgtttatgctcactccgcagtgtggcgtcagcagtttcgacaattccaaaggttcgtggacctattccggtattgcctcggcaagttggagagtcgatatttgggctaatttgaccagtgccatgcgctgctccaaagcgctctaccttcaaagtttggagtacgaacaagccgtcagcacttcgctgatagctatgtggccaacctttaccttgctgatacttgacgagcaataccgcatttccgaagaaacagccgccagttggcgcgaaagtgcacgcaccatgcgagccatgatggctgcaggcatgacgaacgaggcgagtgtttcgcaatccgaagccaactgtcgcccaggtggaagcttcgctgctcgacctccggcagcaggtaagggaaatgccgcccgttctgctttctacccctccatcaccctgagcggtacagctggctggaccaactcggcaggaagcatgattgtcaatcccggaaaacttcttctgtctgccatcgactcgctgacacaacccttgttcaacaaagggctgaacgtggcacagctcaagatgccaaagcacagcaggaagaagccaggctcgcttttcagcaagttttgcttaatgtcggcagcgaagtgaacaatgctctgacccaagtgcaggtaacccgtggaaagacggagctctgcacaaggcagataacttcactggaaactaccgtccgcagcacccggttactgatgcggcacggcacctccacctatctggaagtgctcactgcccagcaggggctactctctgcccaactgacacaggtagcccaccgctttgatgaaatacaaggtatcatcaatttttatcaagtcctcggtggaggacgggagtaaaatatactctttctcatcttcattctcttgctcctctatcaatccggcatttccttttttgtggaaatccggcggtagaggaactttcatataagcgggctatggcaaaaaaaactacggtctcctgccgtcaaaccgggacaaactttataactttgcggcatacgacataaaaatctattgattatgaactgcaaatccttgttttttctggctattttttccctgccccttatatcaggggtgtttgctcaaaagaaagtttctattcttggcgattcctattccactttttacggtcatgtctctcctgccgccaatctctgctggtatggagttcccggcgaaaagaaagagaatgatgtgacaaaggtggaggaaacctggtggtaccatttcatccatgagcacggctttcagttggaacgcaacaattcctattccggctccaccgtctgtcataccggttacgagaaagccgattactccgaccgttcttttatcactcgtattcacaacctcggcacccccgacataatccttgtttttggcggtaccaatgacagctgggcaggtgcccccattggcgcataccaatatgatggctggacgaaagccgatttgtatagcttccgtcctgccttttgctatctgcttgcatctctcaagcagctctatcctgcggccaggatttataatattaccaattctgaattatccgaagaggtaactgattccatggatgaaatttgccggtactatggcatcgagaatattcgtttgcacgacattgataaacaatgggggcatccttctgtgcaaggaatgcagagtattgatgctcaggtttgggagtctgtctccccgatattggaggcttctgtttctttgcctgccaagaactaaggacagactcattgggagttatccttttctatcctagatgctaatctttccactgccgtattcttttctttccacaactgtggaaagaaaagaatacggcagtggaaagaaagtaaaatccttgtggcaagaaaaataattagtacctttactgccagcttctgccgatttcgagaacatttcttccccaagtttgctgcaagttttcctcaattctctataaaccattaatttaaattattttatgagtgcttattatgacctttatgaaacgcccgtccccgaaggcgaggaaccgaagtcgctacatgcccgtgtctgttccaagggaaccatttccggtaaagagttcatggaacgggtttttcgtgaagaacatatgccccacgccatggttgtgggtattgtgcaagccatcaccactacgcttggagactggctggcaaagggctatacggtggagatagagggacttggcttcttcagcaccacgctgaagtgtacccatccggtgatgaataagaaagaagtacgtgcggagtcggtcaagatgtccacggtgaaattccgtcccagcatcgaattcaaacgttatgtggcaggtaagatggagttggaacgtgcggataaacgcttctttccggataaaccgaaagcaatgggcgacatggctgcccgtgaaaaaagcatgatggactttctggaggctaatatctgtatcactcgtgcagaatattcccgccttgtccacgtcaccgcccgccgggcttcgagggatttgcagacatttatcgattccggcgtgattcgcaagcgcggtgccggccgttcagtggtctatgtcaaggtatgaattggagcttgtatttcgcgcgcgtatatatataatgtgtcccttcctttccttatcccagttttctttaaaaaacatgctttaaaacatatctatcaatcagtgagttatgaaaaagttcatggaatctctcaaaaaaaccgtgtataaattttgcagatgttcataaaaggcctacttttgcatccgctttcgggaacgaaggcggcgatgttttgacattctgacagtaaaacggagcggtaagcttccatttttctcttctttgtcatcggtttcttctggaacttcggccttggaaaagaaaaatgaaaaaaaacttctgaaaatatttggaagttatgctttaaagttcttacctttgcacccgcttttgaaaatgaaagcagcgcgagttgacattcttttaaaagaaacggtgcctggttcttcttcctttttctttttgcctccctttcgacaagagagacgacgaggaaagagaaaagagagaaaaaaagaaaaaaaacttccgaaaatatttggaggatatacttaaaagttcttacctttgcatccgctttctgaaaagaacagcaatcgtgaaacgagcgatctttgaacagatttacataaacaatacaagtagtacaagagcaaggcttttccttatcaatggggaattgccttgggtaaaacaagagaaccgtcaatacttattttatataggtaaagataaacttttgaattcgagcgtcctgaacagataacaagctgtcgcacattaattttttttaatttgcgcagtcacgatacttttacaatgaagagtttgatcctggctcaggatgaacgctagctacaggcttaacacatgcaagtcgaggggcatcaggaagaaagcttgctttctttgctggcgaccggcgcacgggtgagtaacacgtatccaacctgccgatgactcggggatagcctttcgaaagaaagattaatacccgatggtatatctgaaaggcatctttcagctattaaagaatttcggtcattgatggggatgcgttccattaggttgttggcggggtaacggcccaccaagccatcgatggataggggttctgagaggaaggtcccccacattggaactgagacacggtccaaactcctacgggaggcagcagtgaggaatattggtcaatggacgagagtctgaaccagccaagtagcgtgaaggatgactgccctatgggttgtaaacttcttttatacgggaataaagttaggcacgtgtgcctttttgtatgtaccgtatgaataaggatcggctaactccgtgccagcagccgcggtaatacggaggatccgagcgttatccggatttattgggtttaaagggagcgtaggcggatgcttaagtcagttgtgaaagtttgcggctcaaccgtaaaattgcagttgatactgggtgtcttgagtacagtagaggcaggcggaattcgtggtgtagcggtgaaatgcttagatatcacgaagaactccgattgcgaaggcagcttgctggactgtaactgacgctgatgctcgaaagtgtgggtatcaaacaggattagataccctggtagtccacacagtaaacgatgaatactcgctgtttgcgatatacagtaagcggccaagcgaaagcgttaagtattccacctggggagtacgccggcaacggtgaaactcaaaggaattgacgggggcccgcacaagcggaggaacatgtggtttaattcgatgatacgcgaggaaccttacccgggcttaaattgcaaatgaatgttctggaaacagatcagccgcaaggcatttgtgaaggtgctgcatggttgtcgtcagctcgtgccgtgaggtgtcggcttaagtgccataacgagcgcaacccttatcgatagttaccatcaggttatgctggggactctgtcgagactgccgtcgtaagatgtgaggaaggtggggatgacgtcaaatcagcacggcccttacgtccggggctacacacgtgttacaatggggggtacagaaggcagctacacggcgacgtgatgctaatccctaaaacctctctcagttcggattggagtctgcaacccgactccatgaagctggattcgctagtaatcgcgcatcagccacggcgcggtgaatacgttcccgggccttgtacacaccgcccgtcaagccatgaaagccgggggtacctgaagtgcgtaaccgcgaggagcgccctagggtaaaactggtgattggggctaagtcgtaacaaggtagccgtaccggaaggtgcggctggaacacctcctttctggagtgacgtctcgactcgatcgttggttcttgaagttatgcttccataagaacctcttgtactgcgcgtacttgtttattaaaatatacgagaaaagtagaagccgagccgtaaggcgagggtttgactgacagtcctatagctcagttggttagagcgctacactgataatgtagaggtcggcagttcaactctgcctgggactacttctcagttggtgaccgaccggttacgatttagcgggtctttcatcaatggtgaagggggattagctcagctggctagagcacctgctttgcacgcagggggtcaacggttcgaatccgttattctccacttctcaagattaggaattatctttaatccttaatccttgacaacgatctttgacatgatgtgaccaaaaaaagtaaagttgaaagctgaaagtatatatcgaccatacgtgatcggtaagacaaaaagtaagtaagggcacatggcggatgccttggctctcggaggcgatgaaggacgtgataagctgcgataagccgcgggtaggtgcaaatgacctttgatccgcggatttccgaatgggacaacccgatatcctgaagggatatcatcccgcaatgcgggaggctaacgcagggaactgaaacatcttagtacctgcaggaaaagaaaataaataatgattcccccagtagtggcgagcgaacggggaacagcccaaaccatccatgttacggcatgtgtggggttgtaggaccacgttgtggcaagaaagttggtgagcagaatgttctggaaagtacagccatagagcatgatagctgcgtatgcgaagccaaccgaagcctagtggtatcctgagtagcgcggagcacgaggaattctgcgtgaatctgccgggaccatccggtaaggctaaatactcccgagagaccgatagtgaaccagtactgtgaaggaaaggtgaaaagcacttcgaacagaagagtgaaatagttcctgaaaccatgtgcctacaagcggtcggagcacttttagtgtgacggcgtgccttttgcataatgaacctacgagttactttttccggcgaggttaaggatctcagatccgcagccgaagcgaaagcgagtctgaacagggcgtatagtcggaaggagtagacgcgaaaccaagtgatctacccttgggcaggttgaaggatgggtaacaccatctggaggaccgaaccaataagcgttgaaaagcttctggatgacctgagggtgggggtgaaaggctaatcaaacttggagatagctcgtactccccgaaatgcatttaggtgcagccttgacttatactgacatgaggtagagcgactgataagatgcgagggcttcaccgcctatcaagtcttgacaaactccgaatgcgtgtcagttctatgtcaggagtgagggcatgggtgctaaggtccatgtcctaaaggagaacaatccggaccaacagctaaggtcccgaaatgaatactaagttgaactaacgaagtcagattgctaagacagctaggatgttggcttggaagcagccattcatttaaagagtgcgtaacagctcactagtcgaggagtttggcgtggataataatcgggcataagtattctaccgaagctttgggatgagaaatcatcggtaggggagcattccactctgcgtcgaaggtaaggcgtgagccttgctggagcgtgtggaaaagcaaatgtaggtataagtaacgataaagggggtgggaaaccccctcgccgaaagactaaggtttcctgatcaacgctaatcggatcagggtaagtcgggtcctaaggctcagccgaacggcgaggccgatggcagaaccggttaatattccggtactaccttaaggagtgacgtggagacggagtcgtgacagcgccgcggactgacggaatagtccgttgaagggtgtagatgttgattgttctaggcaaatccggaacgagagtcgaacctgacagtatggagcgtccttctggacaatccaatagtgcgtgtaatcatacttccaagaaaatccgctaaacttaatccttacggtacccgtaccgcaaacggacacacgtagtcgggttgaatatactaaggcgcttgagtgattcacggttaaggaactaggcaaactgaccctgtaacttcgggataaagggtcctcaagcaattgaggcgcagagaataggtccaggcaactgtttaacaaaaacacagggctgtgcaaaattgaaagatgaagtatacagcctgacacctgcccggtgctggaaggttaagaggagacgtcatcgcaagagaagcgttgaattgaagccccagtaaacggcggccgtaactataacggtcctaaggtagcgaaattccttgtcgggtaagttccgacctgcacgaatggtgtaatgatctggacgctgtctcaaccgtgagctcagtgaaattgtagtatcggtgaagatgccgattacccgcgatgggacgaaaagaccccgtgaacctttactatagcttaacattgaatttgggtaattgatgtgtaggataggccggaggctttgaagcgggcacgccagtgttcgtggagccgctgttgaaatacggccctttgattatttgagttctaacccgctgttgcggggacactgtttggtgggtagtttgactggggtggtcgcctccaaaagcgtaacggaggcttctaaaggtgccctcacgacgattggtaaccgtcggcagagtgtaatggcataagggcgcttgactgggagactcacaagtcgatcaggtaggaaactagagcatagtgatccggtgtttctgtatggaaaggacatcgctcaaaggataaaaggtactccggggataacaggctgatccctcccaagagctcatatcgacggaggggtttggcacctcgatgtcggctcgtcacatcctggggctggagaaggtcccaagggttgggctgttcgcccattaaagtggcacgcgagctgggttcagaacgtcgtgagacagttcggtctctatctatcgtgggcgcatgaaatttgcgtggctctgacactagtacgagaggaccgtgttggactgacctctggtttaccggttgtgccgccaggtgcattgccgggtatctaagtcgggattggataagtgctgaaagcatctaagtacgaagccagccacaagattagatttctcagggtcgttgtagactacaacgttgataggacgcaggtgtacaggcagcgatgtcatagccgagcgttactaattgcccgttcactttttgccttgccttgtatggaggtatatacgttcagccataaatgaatgctttgcttttttcgcatcatgtctaccttattcaggtgactacagcaccggggttccacctcttcccattccgaacagagaagttaagcccggtcacgccgatggtactgcgtaacagtgggagagtaggtagtcgccgtttttcagaagaagcctccgtgtctgataaggatacggaggcttcgttcgtttacatatatctcctctaacattccgtttctaccgctaatcactataccttattatatataattattcatcgcatgttcatcagattaattcccgaattaaggtgctaaatgaatgattaaaaacgcttaaaatcagtgttttatattctattttcactttcgtatttcatatattcttcgtacctttacagtgtattaaaaggtatagtaaatcctttaatcagtgaacaatttaatctttttacaaaagaaagtaatatagttgtaaaacaaataagagagacatctgttatttattgtagaatcattagacgacatgaaaacaactgtaaagacattctggatatgcatgctactgatgttgacttgcagcattagcggtaaagccattgacctggtgcagatggatgacagaatggctggaactgctgaagtttccgcttctttatcttcatgttcttctacttccgacaatagtattgacaagaagaattcattgttcacgaataccaagtttgcatggactacggatgtcgaactgggaaacaaaccagtttccgaaacttactcttctcatcaacagcgtttgcgcagggtgattgaagacaatcttttcctcagaaacattcttctgatattatccaaccacgagaatctactcgttcaaggtcgttctaaattatactactcagataaagccccgtactatgcattgacgggcagtgattactatatctatacgcttcggcggattttgatttagccaacttttcttcttattgatttcccccttttttcccttcttgtcttgaagagactgaaagcaggtgacctttagtgtacatatatgctagctaaggttgcaaggatgattacgccctatcggttcgtaagcgggaagtcgtatccctatgctttattttcaaaactctatttaaataccaacaattaaacttttcatcatggaaactactcaaaaaaaagcagcctcttttaaaggcatcagatccgccggttgggtaatcgtaatctgttttatcatcgccgtgcttatttttcactttgtgttgggaaatccctccaacttcatgaacaacgacccgaacaaccatccgttgccgggtaacttcctcggtaccatctataaaggtggattcattgttcctgtaattcaaacgcttttgctgactgtcatcgcactgagtattgaacgttatattgccattggcgctgcctttggtaaggggtcattggtgaaattcgtagctaacatcaaagcagccttggctgaaggtgatatgaagaaggcacaacaaatctgcgattcacaacgtggttctgtagccaatgtggtaaatgccactttgaagaagtatgccgagatggagaatgacacagagctgtccaaagaccagaaactgcttgccatccagaaggaattggaagaagccactgcgctggaactgccgatgatggagcagaatcttcctattattggtaccatcacgactttaggtacattgatgggattgctcggtacggttattggtatgatccgttcatttgccgccctcgcagccggaggttcagccgactccatggctctgtcgcaaggtatttccgaggctttgattaatacagccttcggtatcttgaccggtgcattggccgttatctcctacaactattatacaaacaagattgacaagttgacttacagcctcgatgagattggtttctccatcgtgcagacttttgcagctacccataaatagttgactgctgatagttggagctgcgctgtgacgtaggcttctattatctattcaacgaatgaattctcaattttaattttcaatgaaacgattatgggcagagcgaaaataaaaaagaaaagtacgttcatcgatatgacggcgatgagtgacgtaactgtactgttgctgaccttcttcatgctgacttctacgttcgtgaagaaagaaccggtacaagtaacgactcccgcctctgtatccgagattaagattccggagacaaatgtactccagatattggtcgatccgagcggaaaagtatttatgagtctggacaagcagtccgacttgcgcgaagtgctggaagctatggggcaggagtatggagtgactttcactccggaggaaactaaaaaattcatgctggcgtctacctttggtgtgccgatgaagagtatgaagaaatacctcgacttgccgcaagaccagcaagatgctgtattgaagaatgaggggataccgacagacagtattgacaatcagttcaaggcctgggtacgcaacgcccgtgcagtgaacagtgatttgcgcattgccatcaaggcagatgccaatactccttattccgtaataaaaaatgtgatgaactcacttcaggacctcagagagaaccggtacaacctgattacttctctgaagaccacaagtgaggagtgacaagctacgagttacaagtagaacaagaaaggaaacattatggctgaaatacaagaaagcggcaacaagaaaggtggaaaaagcaagcagaagaaaatgactgtcagggtggactttacacctatggtggacatgaacatgttgctgattaccttctttatgctttgtacctcactgagcaaacctcagaccatggagataagcatgccgagcaatgacaagaccatcaccgaggagcagcagaccaaagtcaaggcttcccaagccatcacgctgttgctgggggatgacaacaagttgtattattacgaaggggaacctaactacaaggactatacttcactgaaggaaactacctatcaggcggatggtctgcgggcaatgcttctgcaacgtaatagagttgctgtgaacgaggtgaacagactgaagcagcagaaactggatcttaagatatcagaggatgactaccggaaacagctttccgagataaaaagcggaaaggatacgccgacagtcatcatcaaggctaccgataagtcttcgtacaagaatctgattgatgctctcgatgaaatgcagatatgtaatataggtaagtatgtgataacggatattgccgaagccgacgagttcttgatgaagaactacgaaagcaagggcgaattgtcccagaacattgctgaatgatgtgtaacacccaaagaaaggaaagaatatggctaaagtagatttaagctcccaagcatggtgtgacctcgtgttcagtggtaagaacaaagcatatggagcctataagatgcgtgagacctctcccagacggcacaacattgccgtgatactggtaattgtaattgcattgataggtttcagtatccctacgctgataaagatggctacccccaaacagaaagaggtgatgaccgaagtgactaccctttcgcagctggaagaaccggaagtgaagcaggaagagatgaagcggatagagcccgtggccccaccgccgcctgcattgaaaagctccattaagtttaccgctcccgtcatcaaaaaggatgaggaagtgagggacgaggatgaaataaaaagccagacagaactgacggaaacgaaagttgccatctccattgccgacgtgaaaggtaatgacgaggaacatggcaaggacatcgccgacttgaaacaagtggtgacgcaggccgaaccagaacctgaaaaggttttcgatatggtagagcagatgccccagttccccggtggtcaggccgagatgatgcagttcatcagcaagaatatgaagtatccgaccattgcccaggagaacggtacgcaaggacgtgtaacctgccagtttgtggtaggtgccgacggcaaggtgcgtgatgtgaaagtgctgaggggtgtagacccctatctggataaagaagctgtccgtgtgataatgtccatgcccaaatggattcccggcaaacagaatggtaaggccgtatcggtgaaatatacgataccggtgatgtttagattacaataagtgtgtgtgttatgaaaacggtgaaacaacttcagctttcaggcttgctggtgctgctgactctgctgtctgcctgccaaagcaagcccaaggacggacaaacggatacgtatacttccggtgtgattgcaattgctgcggacgaaagtttccagcctattgtgcaggaagagattgacgtgttcgaaggactgttccccttggcaggaattgtgccccgttatgtgacggaagtcgatgccgtcaacctcttgctcaaggacagtctgcggttggcaataaccagtcgcagactgactcccgaagagatgaattccttcaatagccggaagttttttccgcaggagataaagattgctacggacgggctggcattgataacccatcttggcaatccggattcactgattagcgtgaaggacatccgccgcatcctgacgggtgatgcgaagcagtggaaagatatctatccggcttcccgtctgggggatatcagtcttgtgtttgacaacaagaactccagtaccgtacgttttgctgtcgattccatctgtaagggtgtaccgctttccagtcagttgaaagcgttgaaaaccaatagggaggtgattgactacgtggcccgcacgcctgatgccatcggtattatcggcgtgaactggctgagcgaccggaatgatagtacggggctctctttcagtaaagaggtgcggctgatgtccgtcagtgctgctgacaaggccatgccggacaacagttacaaaccctatcaggcgtatttgtattacggtgattatccgttggcacgcagcatctatgccttgttgaatgatccgcggagcgcacttccgtggggatttgcctctttcctcgcttccgaccggggacagcggattatattgaagtcgggattggtccccgccacccaaccggtgcgcgtggtgaacgtcaaggatgaataactaaaatgaatgctaacatgaaacgtagatttgtattttgtttgggagcgatgctgtttgcaggtacgctcgccgcacaaacgccggtgcccgaatggcaggcgggggtggataaagtaaaaagtctgataaagacgaatccggagcaggcttccgacgcagccggagaactgctgaagggcaagaacaaaaaaaatgtggagcttgtgacttccgtggcccgtgcctatctggatgcaggacagctgaaagaggcggaaacctatctggagatggcaagaaaggccgacaacaaggctccggcagtttctgtactcgagggtgacatcgcttttgcccggaaagatatcggaaaggcatgccagctttatgagcaagccatctattttgattcgaattataaggatgcgtatctgaaatatgcgcaggcatacaagtctgccagtccttcgcaggccatagagaagctgaaccagctgaaggccatagctccggattgcctggaagcagacaaggagctggcggaagtgtattacgccaccaaccgttttggcaaggctgccgacacctatgccaagttcatcgatactcccgtggctacggaagatgacatcctgaaatatgcttttgcactattcctgaaccacgacttcgagaaatccttggcggtggcgcagaaaggtttgcagaagaatgcccgccatgccgcattcaaccggcttgtgatgtacaacaatgtcgacctcaagcgttatgacgaggcagagaaggctgccgatgctttcttcaatgcttcggataatgccgattattcatacttggattaccgctatcacggtgctctgttgagtgctctgaagaaatatgaccaggccattgaggaatatggtaaggcattggagaaggatgagagtcaggtggatttgtggcgtgagattgccgatgcttatgaattgaaaaacgactatacccaagccattgctgcttataaaaagtactatgactcgctggcacaagataaaaagacgtccgaaaacttattccagttagggcgtctgtactacggagagggtacgtcctcggacactctctccgttcagtctgccgaccgcatggcggcattgcaggctgccgactctgtgttcgcacttgttgccgaacaagcttccgacagttatttgggagatatgtggcgcgcccgcacacactctgccatggaccccgaaactacagagggattggcgaaaccttattacgagaaggtggtggacgtactgcttgccaaaaacgaaccgaggtacaactctgcattgatagagtgttacagttatctgggctactactatctgttgaagagtgactatgctacttcgaaagagtactggaataaaattctggctatcgaccccaccaatgccacagcaaacaaggcattggacggcatcaaatagcaataattttagttgtttgtcgtgtcgggaggagtggagagtgattcttagcgagggcactgaaaaagtcccccatatagtagcgtcctaaaaaaatcggcacatattcaggcaaaagcttgagtatgtgccgatttttttgtaactttatggtagtaatcagacagatatgctaccactacaacagactatacagttcagtaattattcggatctatacgatttgattattcctcgtaacaacctattgcgtcagataaatgatttgatagacttttcttttattaaaaaagaactcgttgacaagtattgtcaagacaatggaaggatggccgaatgtcccatccggatgttcaaatatcttctgttgaaaacaatctatgacatatccgatgtcgatgttgtggaacgatcaagatatgatatgtctttcaaatactttcttgggatgagtccggaggaaacagatttgattaatccgagctcattatgcaagtttcgcaagttgcgtctaaaagataaagatctactggatttgctgattggcaagactgttggcatagctatagaaaagggcataataaagtctcgcacgattatagttgatgccacccataccggctcacgcagcaatccttggtcacccttggagagtctaagattgcgctcgaagcaattgcgcaaaagcatatatgatgccgacgagaccgaaaagagcaatctgccttcgaagaacacggatgacaacattgagcatgagcttgactatacaaaggcattgcttgatgtagttagctcaaatccctcattggcagagatacccaaggtcaaagagcggctgaatatgctcaaggaggtacttgccgatattgaagaccattatatgacatcaaaagatgaagatgcacgggtgggtcacaagagcgaggatgactcgtttttcggctacaagacacatattgccatgagcgatgagcgtataatcactgccgccacagtgacttcgggagagaagggtgatggcccacaacttgaagagctggtaaaccagagccgtgccaacggaatgacggtggaaacagtcgttggagacacagcttattcaggtaaagacaacatcatattatcgaacaatgaagagaatggttttgagctagttgcaagattaaatccagccataagcaatggattccgtaaggatgaggataaatttgatttcaataaagacgctggcatgtttgtttgcccggctggccatatggcaattaggcgcgctgtacaaggaaagaaaggacagggaacgaatcagtcaatggtctatttctttgatgtagataaatgcaagttatgttcaaggcgagagggatgctacaaagaaggcgcaaaatctaaaacatattctgttcaaataaaatcatcagagcatcagcagcatgaggcgtttgagaaatcggaagagttcaggagtaaagcaaaagtgagatataagatagaggccaagaactccgaattaaaaaatgtattagggtatgaccgagcatggtcatacggaatagaatgtatgcgtatgcaaggggctatggttatctttgtagcaaatatcaagagaatcctcaaactcagatgaggggagagccttttcgttctctaaaaagcccttaattggccgtttttaagctttacagggcaagtaaccgctaaattcttagattcaaaagtagaaaaataagttcgccaaatccaattatatggacttggcgaacctttcattttattgcctttagagagcctttttcagtgccctcattcttagctcctccttttttttgaaccttcgtacgtatttccttttttctcaaatctcttgttattctaaaaaaaatgcctatgtttgcagtgtactattatactaatacacataaacaataagatatttaattcatccaagcgtatgttacaagtagaaaacatttcatttagttatcgcaaggggcggaaagaagtcctgagtgatttttcactttcgctggaagccggccgggtttacggtctgttgggtaagaacggagccggcaagtctacgttgctctatctgatgagcggtttgttggctcccaaacgtgggagagtgatgtatcatgataccgacatgcgccgccggttgcccgtcacgttgcaggacatgtttctggtacccgaggagttcgagctgcctcctatttccttggtcagctatattgaactgaacagtaagttctatccccgtttcagcaaggaagacatggtgaagtacctacatttcttcgagatggatatggatgctgatttgggagccttgtccatggggcagaaaaagaaaatcttcatgagctttgcgctggccaccaatacttccctgctgctgatggatgagcctaccaatggactggatattccggggaagagccagttccgtaaattcctggcttcgggtatgtcggacgacaagacgattgttatctccacccatcaggtgcgtgacattgacaaagtgctggaccatgtgctgattatggacaacagccgcgtattgctggacgaatccactgccagcatttgcagtaagctgttcttcttggagagtgacgaccgggagttggctgcgactgccttgtacacgcttccctccgtacaaggcaatttcttgatgctgcccaatacggaaggtgaggaatcggagattaatcttgaactgctgtttggcgccgtacttgcagagcctgggaagatagcggaaatgtttcacactaaaacaaatgaataatgatacgcgataccttttttaatttgcatcgctttgtgaacgtatgccgcaaagagatggtggagaattggaagacctatatactccgctcggtgatggtctacggaatgttggccatagtctttgtctggaatggatactatcagtatcacaatctggaagcgggagctgtgggcatggaccctatctgggagtttgagtccagattctttctttggggacttgtcatttggggatgcattagcgcctcgtttaccatggaaaggatgaaaagcaagacgagtcgtaccgttgtgctcatgacacctgccaccatgttcgagaaattctttgcccgctggctggtggctacctgcggctttatcttggtctttctgatagctttcaagctggcggacttgacaagagtcgtcttctatcttctggcctacccggagctgcatgtcgttcactcctttccgttgtgggaattctgctgtaacacgaactgtttctatgagacgataggaagcggaccggctgtggtggggatattcctgagctgctactttttcctacagtctttcttcctgctgggcagtacggtctggcccaaaaatgcacttatcaagacttttgcggccggtgtctgcatcttcgtttcatatatcctgatagctgtattgtgcctgaaggccattctgcctaataacttcttcatgactgagccctatattgacagggaggcatcgggcggctggctgatttttataacttcgtttttcgcccttttcaactgggtgcttgcctatttccgtttcaaggagtccgaaatcattaatcgctggtaactatgaactttaaggaaagcaaggccatctacctgcaaatagcagaccgcatttgcgacgaggtacttctcgggcaatatcaggaggaagaacgtattccttcggtacgggaatatgcggctgtggtagaggtcaacgccaatacggtgatgcgttcgtacgactacttgcagacgcaaggagtgatttacaacaagcggggtatcggctattttgtgtcggtaggtgcacgtaagctgattctttcgttgaggaaagagtattttctgaaggaggaagtggattatttcttcaagcagattttcacgctgggcatctctgccgaggagttgtccgggatgtatcaggagtttatcaagaaacaaaaataaaagaagacagttatgaaacgaacgacttatataatgataggaatgctggttaccggtgtggcaatggtatgcggactcatgttctatgtggtggaccgcaatgtcactcagaaagataattttatggaaatcggcggagaacggaaaacggtgcagctgccctcgtgcagggtgttgaagctgacacagcctccggtggtgtggaaacagaaaaaagaaggtattgtggaggcggagcgtatattctcgttcggggaagtgccgttggaggtgactgccgactctttgcagcagggcagtttctcctatgcaggggatatggaggcttttatgtcgatgacttccgttggcgataccctgctcgtcacctttgactttccggaggataagctggaacagcatcttcagaatgacatttggataagggttcgttcagaagggatggaattgcggttgcctgcggaggtacaagcggttgtggtagatgtggaggatatggaaaccaatttctacggactccgttgcgatacgctctctttccgcacgcgataccttgcccggctggaagattgccatgtcactgcgcttgcggcgcaggcgcagagcttgcatctcaacagcggcacagtgcgcaacctttatctgaatctggacgagatagccgactgggatgtcaataccggttccttccatatcgatacggagcatctgtccggcagtcgctatcatcgttgtcttttgcagaagaatgaatgccgccgggtgttctggacaccgttaaaggatgatgcctctttgagtgtggagttaaaacaagcagttaaaatagaagtaggtgagtagccataatacgaaatgacttatctttgcacatgaatcaaaaagtgtagagtatatggccttgcaattggcattcgtattggtagctatcattataggcgcccgcttgggcggcattggactaggtgtaatgggagggataggtctggcaattctgacgtttggtttcggattgcagcctacatcacctcccattgacgttatgttgatgatagccgccgtcatttctgccgcatcctgcatgcaggcggctggcggactggattatatggtaaagctggcagaacggttgttgcggaagaatccttcacaggtcaccatcttgagccctattgtgacctatttgtttacttttgttgccggcacgggacatgtggcatattcggtgcttcccgtgattgccgaggttgccacggagaccaagattcgtcccgagaggccactgggcattgcggtgattgcttcgcagcaggctattacggcaagtcccatttcggctgccaccgtcgcactgcttgggttgctggcgggatttgatgtcaccttgttcgatattctgaaaataacgattcctgctaccattatcggggtacttgtgggcgccttgttttccatgaaggtgggcaaggagttggcagacgacccggagtacagaaagaggttgaccgaaggctatcttgatgtcaagaaggtggagataaaggatatacacaataaacggcatgccgtcttgtccgtgcttatctttatccttgccactgtttttatcgtgttctttggttcgttcgacagtttgcgtcctgccttcgtgatagacggcgagacggtgagactcggcatgtccgccattatcgaaatcgtgatgctctctgccgccgccctcatcttgctgctgactcgcaccgacggcatgaaggcaacgcaaggctccgtcttcccggcaggcatgcaggcggtgattgccatattcggcattgcctggatgggagatacttttcttcagggaaacatgcttcagttgacccagtccatcgagggagtggtgaggcaaatgccgtggctgttcgggatagccttgtttgccatgtcgattctgctttatagccaggccgccactgtgcgcgcactgatgcctttgggcatcgctttgggcatttcgcctatgatactggttgctctgttcccggccgtaaacggttacttctttattcccaactatcccaccgtagtagcagccattaatttcgaccgtaccggaactacccgtatcggcaagtatgtgctgaaccactcgttcatgcttcccggacttgtttcgactggcgttgccatcgggctggggttgcttttcatcaggatattctaagggaaaccgctgctttcaatccgttgtatatagggctttgtttacttgtgtataggggagtgttcccttttactcattgccttatcagcgcctaatggtcgtgcggcgatctgctgacggctgttaagcgggttgttgatggccgttaggcgattgcatcatggccgttgcatactgttgattccttatgtccgacgtaataaataccttcattctctgaataaagcacagaggaaaacagtattgaagtcttggctttgtgtggctgtacgcatttgttctgattgcatttgaagggggaggagatggaattaataccgtgtttgcaggatattgatttcgtgcaggtacgatataaataagatgtgatacaagaaattaataacttgtgttacttcatgttagcttcttgtgtgtcagtatttctgtttgtgaaacggtgtggaagcaaattttgcttccacacttttgagttgcttccaccgcatctgtaatgccgatgaataaagggatgcggagaggaggtggaagtgtggaagcaatttgcacaaacattatttgcgcaaacatttttttctgtccttgatgggaattaaaaaaaatgaggataaacggcctttaaaccttttatcctcattgtagttgcggagatccgactcgaacgaatgacctttgggttatgagcccaacgagctaccaactgctccactccgcgatgttattgttttgtgggtgcaaaggtacggctttttatttaatatgcaaataaaatgcatgatatttttgaggttaagtggattttaatgagtaatatgttgataaatagaacgataataagcctactttttttcttcctttttagggctgttcattaataaaatgaatgttttcttgtaagatatgcggaaatgtcttacttttgctcaaataataaagcaatgtgcaattaatctatgaccgtatcgaagacaaaagctaaattagtggacgttgcccgtcagctgtttgcaaagatgggcgttgagaataccacgatgaatgatattgccctcgcttcgaagaaaggtaggagaacgctctatacctattttaagagcaaggaagatatctacttggctgttgtcgagtcggagctggatattctttcggatatgatgaagcacgtggtagagaaagatattcagccggacgagaaactgatggaaatgatttacacccatctggatgcggtaaaagaggttgtctttcggaatggtactcttcgtgccaatttctttcgggatatttggagagtggagaaagtgcgcaaacgtttcgatgctacagagacccagcttttcaaggaggttctgcgtgaaggtatggagaagggcgttttccagatagatgacttggatatgactgccgagattgtgcattacagtgtcaaaggtattgaaacaccttatatccgcggtcatataggagccaatctggatgatgcggtacgcgatacttacgtgacccgtctggtacttggtgcattgggaaagaagtaagaatacattttataaataattttaaaataatatgggattattagatggaaaaacagccattgtgacaggtgctgcacgcggcatcggcaaggctatcgctttgaagttcgctcaagaaggagcaaacatcgcattcactgacttggtgattgatgaaaatgccgaggctacggcaaaagaattggaagctttgggagtaaaggcaaaagcttatgcctccaatgcagcaaactttgaagacactgccaaggtagtggcagaaatccataaggactttggacgtattgatattctggtaaacaatgccggtatcacacgtgacggtctgatgatgcgtatgagcgaacagcaatgggatatggttatcaatgtcaacctgaaatcggcatttaactttatccatgcctgcacacccatcatgatgcgccagaaggcgggtagcattatcaatatggcatctgtggtaggtgttcacggcaatgccggccaggccaactattctgcttccaaagccggtatgattgctttggccaagtctatcgctcaggagctgggctctcgcggcatccgtgccaatgccattgctccggggttcatcatgacagccatgaccgacgccttgtctgaagaggtgaaggctgaatggtgcaagaagattcctttgcgccgtggcggcacacccgaagacgtggcaaatatcgctactttcctggcttctgatatgtcttcttatgtatccggtcaggttattcaggtagatggtgggatgaatatgtaatttaatgattaatgattagtgattaatgtttaatgagaagttgggtgttagtcattaatcattaatcactaatcattaaacattaacaatcgatgactgtcgtatacgaagacaatcatatcattatagtcaacaagaccgcttccgagatagttcagggagacaaaacgggtgatacaccgctttcggaaactgtaaagcagtacctgaaagagaagtacagcaagcctggaaatgtctttatcggtgtcgcccaccggctggaccgccccgtgagcggtcttgttgtttttgccaagaccagtaaggcactgtcgcgtctgaacgagatgttcaagaatagcgaggtgaagaagacttactgggcagtggtgaagaacctgccccgcgaggaagagggggaattggtgaactatctggtgcgaaatgagaaacagaacaagagttatgcatacgacaaggaggtgccgggcagcaagaaagcgattttgcattaccggctcatcgggcggtcgcagaactattatctgttggaaatagatttgaaaaccggacgccatcaccagatacgttgtcagttggcaaagatgggctgtcccatcaagggagatttgaagtatggttcgccccgctccaatcccgacggcagcatctgtctgcatgcgcggtatatccgttttgtgcatccggtgtccaaagaactgatagaagtggaggcgcccgttcctcccggaaatttatggaatggttttgaaacgatttaatcttacagtaatgaagaaaatcacagttttgtcgggtttgctgctccttgcgggattggctgcccaagctcaggaaagagttgctgagtataacgtgcgtccggccgttacggtgcgcactcccctccagggcgatagtatcaacttcaagggagacaagtttactaccggcaatcttctgaagacgaaggtcagtctcgacttcgacggaggtcggtacgaacgtatggttgctgatacggctggatatgtaactgtggcaaaggcggacaaggacaatctgttctatctgtttgctaccaatctgcgtgcggagcgtttcatgaagggcaagctgaatgtatattctcctgcccgttttgaggtgtttgtaaacggtgaatccaagcaagtcaaggagacagcggaggacagcttgtcgcaggtccgtcctacggctgtcagtttacgtatggaccccgaagcggattatgagattgtcatcaagttgctttcaagcgcggacgacaagatgcagccgatgctgaaatgcgaatttgaaaaggaaaaggactttgccgatgtagcctgccggatggcaccggacatgaagagacgtttctctttgttcaacaccaatttcggctcccgagcgagcagggtttctctttcgcccaacggcaagtatctgctgacccgctattcggacaattacgacgtgaagcgttccaggacccgttgtgagctgaccgaggtaaagaccggccgggtgatattgcccaatgccaatgaaaagatgaactggatgcccaacagcaacaagctctattatacggttatgggcgaggagcagaatgacctggttgtgttcgatcctgccacgatgcgtgaggaagtgctgctgaagaatgttcccgaaggatatttcagctggtctcctacagaagactatcttatttatatgctcacggacgagggcgaaaaggtgagtggcccgttgaaacgtctcttgcatccggacgaccgtatccccaattctcgtgaccgctattatctcatgaaatacgatgtggcgacgggactttccgagcgtctgacctacggtagtcacaacgtctatctgaatgatatttccccggatggcaagaaactgttgtgcagcacttccaagccggacatcactcgatgccctttctccctctcttctcttttcgagattgatttggccaccttgcaggcagatacgctggtcgcctgggatgcttatctgggaagtgcttcttactctccggatgggaagcagcttctggtgacgggcagtccgtctgctttcggaggcattggcaagaattgcggtgaacatcccatagccaatgactttgatacccaagcattcattatggatttggctacaaagaaagtgcaggctatcacgcgcgatttcaatcctacagtgtctcccgtgcagtggaaccgtgtggacggatgtatctatttcgatacgactgatggggattgcaggcatatataccgttatgttccgaagacgggtggctttgaaatgcttccgcttgaagaagatgtgattacttccttcacgctggccaatgacaatccggttgtggctgcctatgtgggtggaggaaacaccagtacgggcgtagcctatacgtacgacacgaagaaaaaagtttctaccctgcttgccaaccccatgaagcccgtcctcgacaagattgagctgggacagatggaagagtggaactttacagcttcggacggtacggagataaagggaatgatttgccttccgccgtctttcgacccgaacaagaagtatccgcttatcgtgtactattatggaggaacgactcctacgactcgcggtataacttccccgtactgtgcacagttgtttgcgtcacgtgactatgtggtttatgttatccagcccagtggtgccatcgggtacggccaggagttctctgcacggcatgtcaatgcatggggtgagcgtacggctgatgagatcattgaaggtacgaagaaattctgtgcagcccatccgtttgtcaacgataaacgtatcggatgtctgggtgcctcttatggaggattcatgacgatgtatctgcagactaagacggacatgttcgctgccgctgcctcgcatgctggcatcagcaatgtgacgagctattggggcgagggttattggggatattcctataactctgttgcggcagccgatagctatccttggaataatcccgatttgtttacgaagcatggagcattgttcaatgcggacaagattaatacccctctgttgttgctgcatggcacggtagatacaaacgtgcctatcggtgaaagtatccagttgtataatgcgctgaagatattgggcaagccggtggaatttattaccgtggatggtgaaaaccattttgtacttgattatgcaaaacgtgaattgtggcacaattcaattatggcttggtttgcccgctggttgcaggatagtccggcatggtggaatgacctttatccggaaagacattggtgatttcttagttgacaactatcaactatcaattaaaaaagccgtttcccagaatagacaaggaggaaacggctttttgttgtagtgtgcttactgttattgggccacttttgctgtgtcttggacgttctcggctttctgcaaagtatccgttaccacagtgtcgttagacaaggttgttgtcttactcggctgttctaccggagccttagcttgagccaagaacgttccgccacaaacaaacataaacagggctgctactaatactaattttttcataattcatttgcttttaggttgctatatcttattgttaagtctaagtgcttgtttgttgtagcgcttgttgcttgtacttaatacaagtcaaatggtgtgccaaaagaattgtttgttgggtaatgctttgataactagatgtatatgtttttatgcaaagtgtagtataatgtggaaaagtggggaatgtgtggagaggagtgtggaattattccacatcttttagtcggatatgttataaagcttcaacttgttgtacagcgttttgcggtcaatgcccaacagttgtgcagcgcggctcttgttgtttcccgtctgccgtagggcttcgatgatttgacgcttctctgcctcctcattgcggagagggatgccgatgatggccgatgcaggttctttcagttcacttagttcgttgatagtaatgaatttgccttgtgccagcagggttgcacggcgtaccatattcttcatttgtcgcagattgccaggccaggggtattccaataaggcgcgggatgctttgtcatcaaagccggtcagttgcttgtccatttcgcggttggcctggtccagaaagaaattggcaaagagcaagatgtcttcacggcggtctttgagttgcggcatgcgcagggtgaattcattgatacggtgatataaatcctcacggaacgttcctttttcgatggcttgctccagattttcgttggtggcggataccagacgtatgtccacgcttatctctttgtttgaaccaaccggacgtatcttgcgttcttgcaaagcacgcagcagttgtatttgcacttcatagctcagattgcctatctcatccaggaagatggtaccgccgttggcttcgacgaaagcgcccgttttgtcggtcagtgcgccggtaaaggcgccctttatatgcccgaagaattccgaagcggccaattctttggggatagaaccgcaatcgatggctacaaacggccggtcggcacgcttgctgagctggtggatgcgatgggctacgtattctttgcccgttccgctggcaccattgatgagtacggacatattggtaggtgaaaccagtttcacataattgtagagttgtttggctgcgtcgctctctccttcgaggaagtcggaggaagacaatgagccttctgcactcttctgagactgatttttcatcttgtcggaatgcatcgtctgtttaggcgagacggatggtctgtttggggtaaacgcgtcatctgttcgggacggatgcatcatctgtttcaaagcggaggatgatgcattcaaggcttcgcctatttttttcagtaattcgtccggattcacaggcttggcaatgtaatcgcaggctcccagtttcatggcttggacggccgactgtatgtcagcgtatcccgtcatgatgataagcggtatttgcaggccgtgttcgcccagccatttcaataagtcaatgccatccttgtcgggcaggcgtaggtcagacaaaatcaagtccacggtttccgactcaatatgtttttgagcacgggcaatgctgctggtggaggttacttggaaaccttttttgccgagccatgtttttagcatcatgccgtaagtaatatcatcttctacaattaatatggatgtcattgcttttgccttttatctcttttatgtaggcaaaggtaagtgcttttgtctgattttagtatatttgcaaacttaaattaaataaaaaacaaaatgaaaaggaatctaattgtattattaactatactggtttgcggtttgactgcttgcaagccgggacaaaagaaagaggaaaatatggaaaaagaaacgaagctgaagattgaaacaagtgcgggtgacatcaccgtgaaactgtataatgaaaccccgaaacatcgtgataactttattaagctggtgaaagacggcacgtatgaaggtacgctgttccaccgtgtcatcaaggactttatgatacaagcaggtgacccggaatcgaaaaaggctccaaaaggcaagatgctgggggcaggcgacgtaggttatactgttcctgccgaatttgtttatccgaagtattttcacaaaaaaggtgctttgtcggctgcacgccagggtgatgaggtgaatcccgacaaggcatcatccggctgccagttctacattgtgactggaaaagtgtataatgactctaccttgctggggatggaacagcagatgaatcagatgcgcctgaacaatgctttcaatgcattggcccagaagcatatgaaggaaatctacaagatgcgtaagaataatgaccaggacggtctgatggatttgcaagattctttgattgcgcaggcagaggctcaggttgccaaggaaccggagttcaagtttactcccgagcaggtgaaggcttatactaccatgggtggtactccgcatttggacggtgcatataccgtattcggtgaagtgctggaaggtatggatatagttgataaaatacagaaggtcaagactgatcgtaacgaccgtcctgaagaggatgtggttattaaaaaagtgacagtgatagattgatgatagattctgtcattctattttatgaagataaacaaaaagatatttgacaacggtctgcggttggtgcacaatgaagataccagcacgcagatggttgccttgaatattgtttatgacgtaggtgcccgtgacgagcatcccgagcatacgggctttgcccatttgtttgagcatctgatgtttggaggttcggtgcatattcctgattatgacgctcctttgcaactggcaggtggggagaataatgcatggaccaataatgatattaccaattactacctgacggttccaaaatcgaatgtggaaatcggcttctggctggagtccgaccgtatgctggaactggcattcagtgagcaaagtcttgaggtgcagcgtgcagtggtgatggaggagttcaagcaacgttgtctgaaccagccgtatggtgatgtggggcatctgcttcgtcctttggcttatcaaacgcatccttatcgctggcctactatcgggaaagacctctctcacattgccaatgccacgctggatgaggtaaaggaattctttttccgtttttatgcacctaataatgcagttctggccgttaccggaaatatttcgtgggaagaaacgattaggctgactgaaaaatggtttgctcctattccccgtaggaatgtgcctgtaagacaattaccgcaagaagttgtacagacggcggaacgccggcagacggtggaacggaatgttcctctggatgctttgttcatggcttatcacatgtgcagtcgtgaagatgccgattattatgccttcgatattctgtcggatattctgagcaatggacgttccagtcgcttgacccgcaggctggtgcaggagcaaaagctcttttccagtctcgatgcctatatctccggtacacgggatgccggactgctgcatatcagtggaaagccatctgctggcgtatctttggagcaagccgaggctgctgtccggaaagagttggaagagttgaaatccgggtttgttggagagcaggaattggagaaagtaaagaacaagtttgagtctacacagatattcggcaacatcaattatctgaatgttgccacgaaccttgcctggtttgaactgaccgggcaggcggaagacatagaccgtgaagtggacaattaccgctctgtgacggcagaacagcttcatagggtagcccaacagaccttccgcgatgaaaatgggattgtgctttattaccaaaaagaaaacctttagtatgagaaatttatttgatacgtataagcaacactacaaagcattgcttctcctgggactacccattgtggtggggcagttgggagtcattgtgctggggtttgccgatacgctgatgattgggcatcatagcacggaagagctgggtgccgcttctttcgtaaacaatctgtttactctctgtattattttcagtacggggttcagctacgggctgaccccggttgtgggaggcttctacggtaaccgccgttttgccgaagccggacaagcgttacggtgcagtctggtggccaatgtgctggtagctttattgctgactcttgtcatggctgttctgtatttcaatgtggaacggctggggcagcccgaagaattactgcctctgattaagccttattatctagtgctgcttgcttcactggtttttgtcatgttgttcaacggctttaaacagtttacggatggcatcaccgacaccaagacggccatgtggattctgcttggagggaatgcgcttaacatcgtaggaaactatattctgatcaatggaaaattgggtttcccggagatgggattgcttggcgcgggtgtaagtaccttgttctctcgcattgtgatggtcgtggtctttgcggtgattgtgcttcgtagtcgccgttttatccgttatagactcggattcatgaggctgggatggtcgacaccgatgtttaggaaactcaatgctctgggctggcctgtcggtatgcagatgggaatggagaccgcttccttcagcctcagtgttgtcatggtggggtggctggggacacttgctctggcatcacatcagataatgctcactgtctctcagttcaccttcatgatgtattatggcatgggtgctgcagttgctgtgcgtgtcagtaactttaaggggcagggcgacgggcagaatgtgcgccgttcggcgtatgctggccttcacgtcatcttatgcatggaagtggtgctgttgagtattgtctttgcacttcgcggtcaggtcggaggatggtttacagataatatggaagtgtccggtatggtagccgctctcttctttccgttcctgatttaccagttcggtgacggattgcagattaattttgccaatgccctgcgtggtatctcggatgtgaaaccgatgatgattattgcatttatatcctattttgttatatctttgcccgtagggtacctctgcggtttcatcttcggctggggactgacgggggtctggatggctttcccgtttggactgaccagtgcaggggtgatgctgtggctgagattccgtagacagaccagggaaaggatttgataatatgaacagtgtctccaaagtaaagattgccgtaggctacactttgttgctggcggtattgtttttttccttgttcttcgtacaccgggagatggagaaccttattcttaccgatgaccgcgatgtacaatggacagacagcgtactagctttgatacgcgagaaggataccaatacgataagaatgctgcgtacgctgagtgaggcgaatgacagcatggtatccaccagtgacattgagcagataattgcccagcaggactcagtagtgacccagcaacgtgtgcagcaccgtatcattacacatcgggataccgtcgtgacacgccctcggaagaagggttttttccgtcgtttgggtgaagtgtttgtccccccaaagaaagatacggctatccaggtaaagacctccctcgaatttgcgacggatacggtgattgaaccttataatccggccgattctttgcatgagaaactgcgtgctgtggcccagcagaaaaaagctgtaaacactgttatacaacgacgtaaacgctatctgcaacgcttggaccatatgctgaccgctcgtattgacagtttgctgaaagattatgagacggaaactctgctgcgtgcacggacggaagccgagtatcaacaggcggtccgacgccgttcggccaagattatcagtggcattgccgtaggtgcggtattgctttccgtttttttccttattatcatcggccgcgacataacccgaagcaaccggtaccgccgtgagttggaagaggctcgccgtcgtgccgaagatttacttgctgtccgtgaaaaactgatgcttgccattacccatgatttcaaagccccgctcggttctatcatgggctatgccgatttgctttcccgtctgacggtggatgagcgccagcggttctatctggacaacatgaaaacctcatcggagcatttgctgaagctggtcgttgatttgctcgacttccatcgtcttgatttgaacaaggctgaagtcaaccgggtcacttttcatccttcccgcctgcttgaagagatacacgtaagttttgaaccgcttacggctgccaaagggctggagcttcattgcgacattgccccggagctggacggtacctatatttgtgaccccttgcgtctgcgtcagattatcaacaatttgctgtccaatgccgtgaagtttacggaccaaggcggtattaccatgactgcccgttacgaggaccgtcgactggtagttgccattgctgatacgggtagaggtatggagcctgctgaccgtgagcgtatcttccaggaattcacccgattaccgggtgctcagggtaaagaagggttcggactcggactttccatcgtccgtatgttggtacagttacttgaaggtacgattgatgtagacagtgtaccaggtaagggaagcactttcacgatatatattcctatctatcccgtaaggagcgaaaggcgtagaatgaaggatgaagaattgggctgtgttgtcacgccggagggcaattcttcattctccgttccttgttcttcattgaagaatgtcctccttatcgatgatgaccgtattcaacttacccttactgccgccatgcttcagcagagtggtataaattctgtttcttgtttacaactggatgaattgctggatgccttgcgcactgcaacctttgatgttctgcttactgatgtgcagatgcctgctattaatggttttaatttactgaaactgctgcgtgcttcgaacataccgcaggcacagtctgttccggtgattgctgtcactgctcgcagtgacatgcagcgtgaggaatttacggcgcatggctttgccggatgcctgcataagccgtttaccgtcagtgaattgctgcatgaattgaatgtggaggacaaagggaaggaggttacggaagcttcggcttgcccggggtataaattctcttcgctcaccgttttttcggtcgatgaccccgaggccgcaaagtccattctggaaagttttgtggctgaaacccgtctcaatgcggagcgtttgcagaaggctgtggagaatgaggatgtggacgagatggctgctgtctcccacaaaatgattcccctctttacgttgattggagctacggaactggttgcattgctgaaactgttggaaacttcgcatggagtgccttttaccggagagttgaaagagcacgcccttgccgccctcgttttgatagaggatgtcattactcaggcaacagcttttccgtaatgggggaacagagaagaatacatgatttttctctatcgggaaccaaatgtcgaaagaaattgtttactttgtaggacttttaaatacgatgaaagattgacgttccgatgagaagaaaatggttgagaatagcactgtgggtgctgcttactcctattatactgtttataatattgatgatactgctctatgtgcctcccgtacagaatttgatacggaagcaggctacagcaattgcatcagatgctacgggtatggacatatctgtggagcggattgaccttcgctttcctttgaatttgttggttcgcggtgtattggtggtacagcctgccgacagtgctgttgaggtgcagcatcccgatactttgctgaatcttggaagtttgaacgtgcgggtgcaggcatggcctttactcaaagggaaagtggaggtggatgacattaccctgaaacaagttgctgttaactcttccaatttaatggaaggtatgtgcatcaaaggggtactggggcatttctttttcgaaagccatggcatagaccttacaaaagaagatgctattctcaataatatagaattgagcgatacccatgtgcaggtaatgcttgcagataccactgagactcccaaggacactactgacactgcgttaaactggaaagtcacactccataccctgaagttgaagaacgtctcggtcgatttacagatgccattggactccatggggctgaaagcccatataagaaatgctgagattgcggacgctgctgccgacctgaaacaccagttctatggctggagaaaattcctgctgactggaacttctgtcaattatgataccggcggcccggggagtgcgataggtttcgacccctcgcacattgctcttcacgacattcgtatgggcattgattctgtgatgtactacggtagagatatgaatgccgttatccgggaattttccatgtatgagcgttccggtttgagtgtaacttccctgaccgggcggttgtttgccgactctaccgttatccgtatcccttctttgaagttgctgacacctcatagtgagatgaatcttacggcacagacttactgggaactgataaatatacctaccaccggccgtttgacagcccgtttcaatgcccgtatcggcaaacaggatgtactgctttttgccggtggcctgccggaaactttcaaggaagcctatccgttccgtccgttggtgattcatgccggtacggaaggaaacctgaagcagatgcagatttcccgttttacggctgagctgcccggagccttttcgttgagtgggggaggagaattctggaacctgaccgacagtgtgaaacgcaatggaaacatggacttcgagatgcatacgcagaacttgaacttcctgaccggactagctgacattgctcccgatggctccgtcatcgtgccggacagtatgcaccttgcggcacgtgtcggtatggagggggcgcagtgcactgccgccctgaaactgcaggagaaggaaggcgccttgaatctggatgccgcctataatcttgctacggaagcctaccatgccgaccttgccatcaacaacttgcaggtgcatcacttcctgcccaaggactctatttatactcttacggtaaagatgtccgctaagggacaaggggtggatgtggcatcacgaaagactgtggctgctttgaatgcctccttggaaaaactacagtatggccattgggacatttccggtgtggatgtgcatgccggactcaagtcatccgttgctactgtccgtcttgccagcgataatgttcttctcaagatgcagggaaatgcagatatgcgtcttgaccgcagctatctggatggcgctttggatttgaatgtggaagaggtgaatctgcataagctggggttggtgccccgaccgttgaaacacccatttgcctttacaatgggagcggaggcacgtcatgattctctcgagttgaggcttgatgccggtgacttgaatctgcgtttccgcgctcatagcacgttgaagaagttgatggaacagtcggataaatttgtctctatcctgacaaagcagattgatgaacggcgtttggaccatgccgctttgcgacaagtccttccttcagccggcatgtatctggaagccggtaaccagaatcccgtcagctatttcctggctgcaaagggtatttcctataatgatttcaaactgagcttcggatttactccgcaagtcggcatcaatggacgtacagctgttcacggattgcgcatggactccttgcagctcgatacgatattttttacagtgaagcaggatactgcccgcatgaagttgcaaggtggtgtcataaacggtcccaagaacccgcagtttgtgttccgcagtacactgacgggtgaagtccgtaatgaagatgcggagctgactgtggattatgtggatggaaaagggcagactggtgtgctgttcggtattaacgcccgtccgttgaccgaaggacatggtcgcggtgatggtgtgctgctgaaccttattcctgccgagccgattatcgctttccgtaaattccactttgcggacaatagtaactggatttatctgcataagaatatgcgcgtctatgccaatattgatatggacagcgacgatggtctgtgtttccgtatgcaatccgacaagaatgataccctttccttgcagaatataaacgtagaattgagccgattgcgcctggatgaacttacggaggtacttccttatatgcctcggcttacgggattgttctccgccgaagcaaattatatacagactgccacttccctgcaggtgtccgccgaagccaatgtagagaaactgacctacgaacgccaaccggttggagatataggtctgggggctacctggttgccgggcgacaagaatacgcactatttgaatacctattttacacatgataacgaagaagtgatgaccgccgacggtatcttgacgcagaagaacggaaaggatactctggaagtgtccactcgtttcgagcatttcccattgaagatggccaatgcattcatccctgaccaaatggtggcctttaccggagatattgatggagggctttatatttacggttcgctggataagcctcaaatgcatggtgatattgttttggacagtgtgtctgtctatgcacgccaggcgggagcacgttactggttcgacaaccgtccggtgcagataaaggacaatcagttgatattcgataagtttgccatttataccaccagcaagaatccgtttacgattgacggtaaggttgatttccggaatatggagcgtcctactgccaacctcaatctgctggcagagaattatacgttgctggatgcaccgcgtacccgcgaaagtctggtatatggaaaggtgttcgttgacttgcatgccacggtgaagggaccgcttgacgggctcacgatgcgtggaaacatgaatctgctgggcaataccaacgtaacctacgtgttgaccgattcccctttaacggtggaagaccgtctcagtgggctggttacctttacctcattcaccgatacgacgtcggtaaaggcggatgaagttcctgccatgtcgttgggaggattggaaatgtatatgtccgtccatattgacgatgctgtccgtcttcgtgccgacttgagtcccgaccgcagcaaatacatcgaactggaaggtggcggtgatttgaatatgcagtatactccccaaggggatatgagccttaccggacgctataccctttcgggtggcgtcatgaaatattcgctgcctatcatccccttgaaggagtttcagttcaatcccggcagttatgtggattggcgagggaatattatgaatcctacgctaagcctaaaggctacggaacgtatgcgtgcttctgtggccgacggtgacggggacggttcgcgcatggtgaacttcgatgtttccatttccatcaagaacaggcttgacgctcccgatcttatattcgatatttcggcgcccgaagatggcacagtagagaatgagctgcaggcaatgggggcagaagagcgtagtaagcaggctattgcgatgcttgctacgggtatttacttgaatagcggcgccaaaggaggaggtttgtcaatgggagccgccttgaactcagtgcttcagagccagataaactccttggcgggaggtataaaaggtgccaatatcagtgtaggtgtggaagaccgtacctctgctgaaacgggcgacacgcagaaagacttcagtttccgttattcccagcgtttcttcaacgatcgcgtacagatagtcatcggtggaaaagtatccaccggggccaatgcgacgaacgatgcggaatcattcattgacaatatatcgctggaataccgtcttgatgcgtcgggtacccgatatgtccgtgtattccataataagaactacgaaagcatactcgacggtgagataaccgaaacgggtgttggccttgtgctgcgccggaagatggaccggttgggtgaactcttcatcttcaggaagaaaaagataaaaccggaggctgaaaacagcgatatgaaaaagtaggaatgtgatatgaaacgactgatattatatattgcaggattgatatttctggcaggttgctccaccacgaagcacttgcccgagggggagatactctataccggacaaaagccgatgattgtattgaaccgcagtgaaacgtctgttggcgagattgccatggaagaggtggaagccgcccttgctacggcaccgaacaattcgttgctggggagctctactatccgctatccctttcctttcggactgtggatttacaatggtttccagaagtatgagaagggactcggaaagtggatattcaataaatttgccgccactccggtgcttctgtctacggtgaatcccgatatacgtcagaaggcggcggttaacttgctgcgcgattacggctatttcaacggaagcgtcagctacaagacatttatcgacccgaaagactcgctgaaggcaaagttgcaatatacggtgaacatgcgtaatccttactttatagatacggtgtactatcgtggtttcaaccaacgtaccactcgcattatggagctggggcgccgacgttcccttatcagtccgggagaacaattcaatgtggctgatttggatggggagcgtacccgtatcagtaccctgctgcgtaatgtgggctgttattatttccgtcccgactacctaacctatcaggccgataccatgatggttcccaatgggcatgtccagatgcgcttgattcccgttcccggtatgccaaaggtagccgagaagcagtttcgtgtggggcgtaaatccgtctatcttcttggaaagcaggggcaggaacccaatgacagcatggattacaaaggcttgaccatacattactacaacaaaccaccggtacgtcccaacatgctttaccgttggttgaactatcaaggttatcggcggaaacgtcagatacaggacagcgcaggtattgcccgccagcgttctatgcagagtttgtatagcttatatcgtcaaacccgtattcaggagcgcctggcaagcgtcggtattttccgttatgcggagatgcagtatataccgcgtgatacggcatttgtgtctgatacattggatgtgaaggtcattgccgcgctcgataaaccctacgatgcggaattggattttaatgtcactatgaagagcaataatcagacgggaccgggtgccgcttttacggtgacgaagaataatgtcttcggtggcggtgaaagctggaatgtgaagttgaacggttcgtacgaatggcagacgggcaaggcaagctcttctctgatgaacagctatgaactgggtatctccacttcgcttatctttccgcgcgtggtgtttcccaggatgggcgaccgtgagtatgacttcccggctacaacgactttccgtttgtatgccgaccagatgaaccgtgccaagtattataagctgttggcttttggcggtaatgtcacttatgacttccagcccaaatcgacttccaggcacagtataactcctttccggttgacattcaatgtactgcgcaatcctactgccgctttcgatacactgcgtgccgagaatccggcactctacgttagtttgcgcgaccagttcattcctgccatggagtacacctatacttatgacaacgcttccgtgcgcggcaagcgtaaccccatctggtggcagaccaccgttgcgtcggccggtaacctgacttctgctgtttaccgtattttcggcaagccgttcagtgaggaagggaagaagcttttcggtgtaccttttgcacagttcttgaagctgaactcggaattcaggtaccattaccggatagacaagaaccagatgattgcttcgcgtattgcgggaggggtaatatggtcgtatggcaacgctacgaccgcaccttatacggaacagttctatatcggtggtgccaacagtgtgcgcgccttttctgcacgcagtataggtccgggcggttatcctcccgagacggataggaaatatacctatatcaaccacgtgggtgatattcgcatggaagccaatatcgagtatcgcttccgtatgattgccgacttgcatggagccgtattcttggatgccggcaatgtatggctgatgcgtaaagatgaaaaccgcccgaatggtgaatttacgttgaagaatttcccgaaacagattgctttgggcacgggatttggcttgcgttacgatttggactttcttgtttttcgtctggacttgggtatcgggctgcatgatccgtatgataccgggaagtcggggtattataatattcccaagttcaaggacagcatggcgttgcattttgccatcggttatccgttctaaatgtacctttttgaacggatagtggtaaagaatgaactaaaactcccttctgtcagccataaatttttgtacatttgcagccgttatcaactgtgatatactaacctttttaaataataactaaatatgaaaccaactttattcttattggcagccggcatgggcagtcgttatggtggcttgaaacaattggacggactgggcccgaatggcgaaactatcatggattattctatttacgatgccatcaatgccggttttggaaagctcgttttcgtaatccgtaaagattttgagcaggatttccgcgacaagattatttccaaatacgaaggccatatcccctgcgaactggtattccagtccatcgatgaccttcccgaaggcttcacctgccccgaaggccgtaccaaaccttggggaaccaaccatgctgtaatgatgggtgccgatgtaataaaggaaccgtttgctgttatcaactgcgacgatttctacggtcgtgattccttccaggtaatgggcaaatttcttgcagcccttcccgaaggttccaaaaatgtatattccatggtaggcttccgcatcggtaatacattgagcgaaagcggtaccgtatcccgtggtttgtgcggaacggatgcaaacaacttgttgacttctgtagtagagcgtaccaagattcagcgtatggacggcgaggtgaagtacatcgatgataacggtgaatggactgccactcccgagacgactccggtcagcatgaacttctggggctttactcccgattactttgcttacagtgcagagtttttcaagagcttcctgagcgacccgaagaatatggagaatctgaaaagcgaattcttcatcccgctgatggtggataagctgattaacaatggcactgctacctgcgaagtgctcgatacaaccagcaagtggttcggtgtgacttatcccgaagaccgtcagagtgtagtcgacaagattcaggctttggtggatgcgggtgagtatcctgcgaagctgttctaaagtaagacggaaggataacttgattcgcattaatttattgggtaaaagaacaaaaggacaaatatggggaaggcgtttgccagagctatatttgttcttctgttttctgttcacgaggtgtctggtgcaagcatactgaaatgttggaacagaaccctgcattgggcttaccgatattggaacctttgaaatcagattactccaagtatgcccggaacagcgtagggaattggttaaatgatgcaagtaagacgcaatccggatttgtaaggaagctttgcaggcgttgggaaagtgaaacgaaagagaccaagtatatcgttaagaaaacgctgaggactgtcggtaaatgagtgtctgttccaaggtatggggtgagttttgggcttactgaatcgatgtgcgggaaaaagggcattatatcctcaaacataaatcgttataaccaagtgatgaaacaattaattgcatgttgcgggttggattgcgaaaattgcgccgcccgtatagccactgtcaataatgacgatgagctgagagagaaaactgccaaagagtggagtgtgctgaacaatacgccggaaattacgccggaaaccatccattgtatggggtgccgtgcagacggggtgaagtttgcctattgcagcgattattgtgctatccgcaaatgtgtgtacgaaaaaggtttcaatacttgcggcgactgtaaggaactggatacttgccaggtggtaggtgcggttcttcagcatgcgcccggtgcaagggaaaatctttattaaccgtaaaatctttgattaaataaaatattgcgtatctttgcagtatgacaaagacatttaaatcggatttggttttgtaaacaatctgtgttccctgcacagattgtccccccttcgtttactctcggataacttctttcgagagtgtttttctattgttataattcaagtttaatccgcatattatgctgaaggtattgtgatactttccgtatatgcaaaatatagtaagaaaatgagtaacgaaaataaaactatccacgatttcgaacttaatttaatctgtgactttttctccaatatggaacgacaaggccctggcagtcctgaagcgacgttgaaggcattgagctttgtagacggtcttaccgatgaatcctttattgccgatatcggctgtggaacgggtggccagacaatggtagtagctggccatgtgccggggtggattacaggaattgacctttttcccggctttattgatatcttcaaccgtaatgcaaggcagttaggcttgcaggacagagtaaaaggaattgtcggttcaatggatgcccttcctttcggtgaggaggagctggatatgatttggtgtgaaggtgctatctataacattggctttgaacgtggcttgaaggagtggcgtaagtatctgaaaccgggagggtatattgccgtctccgagagttcatggtttacggacgaacgccctgcggaaatcaatgacttctggatggacgcttactctgaaatggatacacttcccaatcaggtgaccaagttgtacaaggcaggttatcttcccgttgctacattcattttgccggagaattgctggacagagcattactttgcttcaaaggttgcggctcaggagattttccgtaagaaatatgccggtaataaaattgccgaagagttcagcttactccaaatgattgaggatgaactgtacggcaagtataaggaattttacggttatgtgttctttattgccaagaaggtaggctgatgacggacttctcttattgaggaatgcgggtattctcaggacagaatatccgcattttgggttttgagtagattttattgttttgaggatgtacggaatttctgaggaggtattcccgtatgacgtttaaagaatttgttgaagaaggccgcattattaaaacctagactcacggctatatcctttatcggagtgttggcggtacaaagctgtgctttggcatccatgatgatagtattgttgatgatttccatggctgtatgtcctgattcctttttgacaaggcggcaaagagctgccggcctcatattcattttcaatgcataataggacacttgatgctcccggacatagtctgtgtgtaccaatcggataaaaatgcggtattggttgaaatgcctgctgcccggagtctcttttatcctagggtgttccggacagagttcggatatgccttgtaacagatatgccagtagagtttgcaatgaaactagacttgaggggctttctgttctttgatagaggtgtgacaaataggtcatgaactcagcataaagctggaagttctttttcgatagaggaaaaatatagtgtttacctataatgtgaaacttatccatcatgaccttaccgactcctgcactttggataagttgtttggaaaatatgacgacatatatttcagtatcgtctgacgtgtgtagtaattgtacgaaggtctcaggaggaatagctaggagaacgttagcttcaaccttgaattgggtattcagaactcctttgatacacaaaacgaagatactggccttggtgtggtatggctttttcactagcggattcagttcactggttgtgatatgattgcaggcaatgaactcgtcatttatattgaattcggatatattcatgttggagattttaagacgcaaaaatgggggataataatgtataaatgacagaggtaacagttaaaatcaatattacgctcaacttatctctgttaaataaggtaaagttgtgaataatagaatatatacatattaaaatggaatattgatttataagggtttgtttgtggtataagcattttaacccgaactttacttcttgtatgataaaccaattctgatgaatccgaatgttcctcaagaagtacgtataataaatgccatctccgagcagttgttcaactcatggcccgtcagcattattatgattgatttggaagattgtatctggcgtctgaatcagcaggtgatgaatgaactccaattgaatgagtatgtgatagggcggcgtatcactgacttattggaggtggtatgtgataaaaagaatgtgttagaagaccttttgctgcaacttcgggagagggatgtgcggattattcccttagataccaattgctttatacgtgaattgaagagtggtataagttttctgatacaaggtgctatggtgggaattcatgaagatggacaattggtgaggattgtactctatttcaggaatgtgttggaagaacggacacagaagcatttgctgaatattgcgctgagtcgtacccagatatttcaatggtctttcgacatggaacataatctgatgattatagaaccgcgttattttgaatatttggggattcctacgcgtgactatacgctgacgcctgaggaattcgcatttctgattcatccggacgaccggaagggagtgtttgatgctttggctttacagttgcatggtaatttgtacgaatgcccagtggaataccgtttacggcggggagacggcaagtgggagtggtttgaggcgcaatctacctatgtggggcaattgacggatttgccgttccgtatcatcggtatttgcatgagtacgcagaaatacaaggatacggagaataaattgaacgaggctttgcagaaagcgcaacgtagcgatgagttgaagagcgtatttcttgctaatatgagccacgagatacgtacgccgctaaatgccattgtgggcttctctacactactggcttgtggggatgccgacttgtcacggcaggagattatggaattcacgtctttgattgaaaagaacagccagttgttaatggtgttgatttcagatattctggatttgtccaagatagaatcgaacacaatggagttccattttgagaaggtttctttaaatggcatattggaaagcatttacagtgcgcagaagatgaatcttcggaaaggagtggagttactgctagaccttccggaccgggcggcagttatctatacagatcctacgcgtttggggcaagttgtcaacaatcttatcaataatgcggtgaagttcactgctgaaggacgcataaccatagggtataggctgaaggactttgctacattggaagtctttgtggaagatacgggaactggcatgtcggaagaagttctggcgcacatttttgaacgtttctataagggagatgcttttgtgcagggcacgggattgggattggccatttgcaggactatcgttgaaaggtttcatggaaaaatagaagtggcctcaactcttggcaaggggagccgctttgcaattgtccttccgcaggaaatgcgggagtagtgttttctttcttggatatttgatgtaattatgtgagcgtatgatattgtataacgttgaaaatcgctacctttgcagtcttgaacgataaattcattgacactatgatatctgtagaaggactgaaggtagaatttaatgccactcctctgttcgaagacgtctcttatgttatcaataagaaagaccgtatagctcttgtcggcaagaatggtgccggtaagtccaccatgctcaagatattggctggcattcagcagcccactgccggcattgttgccgttcctcgcgaatgtactatcgggtatttgccccaagtgatgatactcagtgacaagcgcaccgtgatgcaggaggctgaacttgccttcgagcatatttttgagatgcaggcgggcatcgaacgcatgaatcagcaacttgccgaacgtaccgactacgatagtgaggattaccagaaactgattgaccgcttcacccacgaaaacgaacgtttccttatgatgggaggcaccaactaccgtgccgaaatagagcgcacgctccaagggctgggctttagccgcgaggactttgaccgctctacaagcgagttttccggtggttggcgtatgcgtatagagcttgccaagctgttgcttcgtcgtccggatgtgttgctgctcgacgagcctaccaaccaccttgacatcgagagtatccagtggttggagaacttcctttccacccgtgccaatgcggtggtgcttgtcagccacgaccgcgcctttttgaacaatgtcactacgcgtaccatcgaaataacttgtggacgcgtttacgactataaagtgaaatacgatgagttcgtggtgcttcgcaaggagcgccgggagcagcaactgcgtgcttacgagaatcagcagaagcagatacaagatacggaagactttatcgagcgtttccggtacaaagctaccaaggctgtgcaggtgcaaagtcgcatcaagcaacttgaaaagatagaacgtatcgaggtggatgaggaagacaactcctctttgcgcctgaagtttgtttgcagcagccgtagcggtaattatcccgtcatctgcgaggatatggagaaatcctacggtgagcacattgttttccatgatgtgaatttgaccatcaaccgaggagagaaggttgcttttgtcggtaagaacggcgaaggaaagtctacgcttgtaaagtgtattatgggtgagattacggattataccggaaaacttacactgggacataatgtgcagattggatattttgcccagaaccaggcacaacttttggatgagaacctaactgtattcgatacgattgaccacgtggccgtaggggatatccgcctcaaaattcgtgatattctgggtgctttcatgttcggcggtgaggcttcggataaaagggtgaaggtgctcagcggtggagagcgtacccggcttgccatgataaaactgttgttggagccggtgaattttctgattctcgacgaacctacgaatcatcttgacatgcgttccaaagatgtactgaaggaagctatccgcgattttgacgggacggtgataatagtcagtcatgaccgtgattttctggacggacttgcgactaaagtatacgagtttggtggcggactggtgaaggaacatttgggaggaatttatgatttcctgcaaaagaagcagatagagagcctgaatgagttacagaaatctccttcactttccgcttcgcccactgccggtaaggcggcatcaggaaatgctggtgcagaaccggctcagccctcggctgccaagctctcctatgaggagcagaaggagcttaacaagaaacttaagaagctggaacgccgcgttgccgattgtgaagcggagatagagcagacggaggctgccattgccattcttgaggctaggatggctacaccggagggtgcttcggacatgtcgctttatgagcagcaccaaaaactgaaagagcagcttgaccgtgtgatggaagagtgggacgcggctactgtagagttggagaatcactaactattatattttatatatttatgaaagcaaatcatttgttacccattgcagcattctgtctgatgacggcatcctgcaacaccggcaagcagcaggctgaacttacagcaggcatccagctcgccaatcttgacacaacggctctacccggaactgacttttaccaatacgcatgtggcggttggatgaagaacaatccaattcctgctgaatactcacagtacggttctttcactatccttgcagaaaacaaccgcaagcagattcaaggactgattgaagaacttgccgccacccagcacgaagccggcagcgtggcacaaaaaatcggtgacttgtacaaaatcgtaatggacagcgtgaagctgaacaaggacggtgtggcccccatcaaggctgaactcgaccagctggctgctttgaaggacaagaaagagctttatgccttgctgggcgatatgcagaagaaaggtatcatcgtctacaacgtgctgtatgttggcgctgacgaaatgaacagtagcatgaatgccgtacagacctatcagaccgggctgagcatgggcgaacgtgaatactatctggagaatgatgaggctactgccaaaattcgtgatgctttccgtacacatgtacagaagatgtaccagttggctggtttcgacgaggctactgccaagaaaggtatggaggtggtgatggatgtggaaacacgtcttgccaaggctttccgctctcgtacggagttgcgtgacccacatgccaattataacaagatgagcatggaagagttgaagaagaattatcctactttcgattgggatgcttatttgtctgccatggacttgaaggatgtgaaggaaatcatcgtaggccagcccgcttcactgaaagctgctgccgatatcctggatacgctgcccattgaacagcagagcctttatttgcaatggaaattgattgattctgccgcaagcttgctgaacgatgctatggcagaacagaacttcgacttctacagccgcactatgagcggtacacaagagatgcagccccgctggaagagagcggtaagcactgtaagcagcgcgctgggcgaagctgtaggtcagatgtacgtggagaaatatttccctgctgctgccaaggagcgtatggttactttggtgaagaacttgcaggaaagcctgggcgaacgtatcaagaatcttgcctggatgggtgattccactaaggtgaaagctctggagaaactggctaccttccatgtgaagattggttatcccgacacttggaaagactactccacactggaaatcaaaaacgactcttactgggcaaacatggaacgtgccaacgagtggagccatgccgaaatgatagccaaagccggcaagccggtggataaggatgaatggctgatgactccgcagaccgtcaacgcatactataacccgactacgaacgaaatctgtttccccgccggtatcctgcaatatcctttcttcgatatgaatgcggatgacgccttcaactacggtgccatcggtgtggtaatcggtcatgaaatgactcacggattcgacgaccagggtcgccagtacgacaaggacggtaacctgaaagactggtggactgctgaagatgccaagaactttgacgagcgtgcccaggtgatggtgaacttcttcgatagcatcgaggttgctccgggcgtatatgccaacggacgcatgacattgggtgagaatattgccgaccacggtggtctgcaggtttcttatcaggcattcaagaaagctacggctgccaatccgttgccggtgttggatggtcttactcccgaacaacgtttcttcctggcatacgcaggtgtatgggccaatgatattcgtcccgaagaagtgctgaaccgcacgaagagcgatgtgcattcattgggcgaatggcgtgtaaacggtgcattgccgcaaatcggtgcttggtatgaggcatttaacgtgacagaaaaagacccgatgttcttgccggtagaaaaacgtgtatctatttggtaaaccaacaaaataacccttaaaaaaaggcggcagactggaaacagatgccgccttttttaattatacctaatttattgtgtatgaatgtatgtatgaataaacaaaatttgtaactttgcgcatcaaatactaatatacgcatactttaatacgcaaatccatgtctgaaacaaaaagaatcaaaacagctctggtatctgtttaccataaggaaggtttggacgaaatcattaccaaactgcatgaagaaggtgtagagttcctctcaaccggtggaacacgtcagtttatagaatctctgggctatccctgcaaggcagtggaagacctcactacatacccttccatcctgggcggacgcgtaaagactttgcatccgaaggtttttggaggtatcctttgccgccgcggattggagcaagacatgcaacagattgaaaaatatgaaattcccgaaatagacctcgtcatcgttgacctctatccgtttgaggctacagttgccagtggtgccgaagaacctgccatcatcgaaaagattgacataggcggtatctccctgattcgtgccgctgccaagaattacaacgacgtggttatcatcgcttcgcaagcacaataccagccgttccgtgacatgctgatggaacacggagccactactaccatcgaagaacgccgttggtttgccaaagaggcgttcggagtgtcttcacactatgattctgccatcttcaactattttgacggtgaggaaggttccgctttccgttgctctgccaatagccagaagactttacgctatggcgagaatccgcaccagaaaggttatttctatggcaatctggatgctatgttcgaccagattcacggtaaggaaatctcttataacaacctgctcgacatcaatgctgccgttgatttgattgacgaattcaaggatactactttcgctatcctgaaacataataatgcttgtggactggcttcacgtcccactgtgctcgaagcatggaacgatgcgcttgccggtgacccggtatccgcttttggtggtgtgctcattacaaatgccgtgattgacaaggctgctgccgaagaaatcaataaaattttctttgaggtaattatcgctcccgattatgatgtggatgcgttggaaatcctcggtcagaagaagaaccgtattatcctggttcgcaagccggcagctctgcctaagaagcagttccgttctttgctgaatggcgtattggttcaggaccgcgaccttaaggtggaaattcctgaagaattgaagactgtaactacgaaggctcccactgcacaggaaattgaggatatgctctttgcaaacaagattgtgaagaacagtaagtcgaatgccattgtgttggcaaaaggaaagcagttgttggcaagtggtgtaggccagaccagccgtgtggatgctttgaagcaggctatcgagaaagccaaaaacttcggtttcgacttgaatggcgctgtaatggcaagtgacgcattcttccccttccccgactgcgtggaaattgccggcaatgaaggtgtaacagccgtcatccagccgggtgggagcatcaaggatgaactctcgtttgaatattgcaacgagcatggcattgccatggtaactactgggttccgtcactttaaacattaaggtcatttactatttgacgatttactatttactatttgccgggaggtgtcattgtaggtggaggtcgtcagatagcagatctgccaaatagtaaatagtaaatcatttaatagtaaatcaatagatgggattattctcttttacacaagaaatagcgatggaccttggcacagccaataccatcatcaccacgaatggtaagattgtggtggatgagccttcggtggtggctttggatcgtcgtaccgataagatgattgccgtgggtgacaaggcaaagatgatgcacgaaaagacccacgaaaacatacgtaccatccgtccgttgcgcgacggtgtgattgctgacttctatgcttgcgagcagatgatacgcggacttatcaagatggtgaacaaccgtaaccgtcttttctctccgtcactccgcatggtgattggtgttccttcgggcagtaccgaagtggagctgcgtgccgtgcgcgactctgccgagcatgccggcgggcgcgacgtttatttgattttcgagccgatggctgctgccatcggtatcggtatcgatgtagaggctcccgaaggcaacatgattgttgacataggtggtggttctacggaaattgccgtaatctctttgggaggtatcgtaagtaacaactccatccgcattgccggtgacgacttgactgccgatattcaggaatacatgagccgccagcacaacgtgaaggtcagtgagcgtatggctgagcgtattaagattaatgtgggtgctgccttgacggaactcggtgaggatgctcctgaagactatatcgttcatggtccgaaccgcatcacggcattgcccatggaagtgccggtatgctatcaggaagtggcgcactgcctggagaagtctatctctaagattgagacagccatcttgagtgcattggaaaatacgcctcccgaattgtatgccgacattgttcacaacggcatctaccttgccggtggcggtgcattgcttcgtggactggataagcgtttgactgataaaataaacataccgttccacattgcggaagaccccttgcatgccgttgccaaaggtacgggcgtggcattgaagaacgttgaccgcttctcattcttgatgcggtaatgcggaatttattaaactttctcattaaatataattactggttcctctttctactgttagaggttgccagttttattttattatttcgcttcaaccattaccagcagagtgtgtatttcacctctgccaatggcgtggcagggaaggtttatgaaatatcgggtggcatcacttcttatttccacttgaagacggccaacgaagacctgctcgaccgcaacatgtggctggagcagcggctttcgtttctggaaaatgttttgaaggagaaaggattggactccgccaggttgtacagcatggaacggcttgctcctacggagtatcagatattcaaggcgaatgtcataaagaacagcttgaacaaggctgacaattatatcactttagaccgtggaacaacagaaggtatccgtcctgagatgggagttgtagatgccaatggcgtggtgggtattgtgtataagacctctccccattattcgttggtcattccgttgctgaacagcaagtcgagcatcagctgtaagattgtaggtagtgattatttcggttatttgaagtgggagggaggtgattcccgttttgcctatctgaaggatttgccccggcatgccgaattcaatctgggagatacagtagtgaccagcggctattccaccgtgtttccagaaggtgtcatggtggggacggtggatgacatgtccgactcgcacgacgggctttcgtatctgttgaagataaagctggctacagactttggaaaggtgagtaatgtgcgcgtcatttcccgcaacgggcaggatgaacaaaagacattggagtcgagggcggacgagaagtgactaagaaattagggattaggggttaaggattaatcatctttatatcttataactatacactcaataacttgtaactcgtaacttataactcattagcgttgttaattaattatctgcataaaataggatggttcataggcttggtactgttgcaggtgctgatattgaacaatgtgcatattgcaggatatgccactccatttctgtatatctacttgatactgaagtttgagtcggacactccccgcaatgcgttgatgttgtgggcattctttttagggctggctgtcgacgtcttttccgacacaccggggatgaatgctgccgctacggtgttgctggctttcttgcgtcccactttcttgcggctgttcgtgcctcgtgacacgctggatacactggttccggccatccgtacaatggggattcttcctttcctgaaatatctggttgtgagtgtgctgatacatcacggcttgttgcttaccctcgaattcttctcttttgcccatatcggtacgctgttgttgagaattgcggcaagtaccctgcttactgtgacttgtattatggctgttgagggaataagaaagaaaggataaagggattaaggattaggaattgatgaaagactatacactggaaaagcggaaatatgtaattggagcggcggctattgtcatcgttcttatttacgtgttccggctgttcgacctgcaaatcatgactgatgactacaagaagaacgcggacagcaacgcttttctgaacaagatacaatatccatcacggggggctatctacgaccgtaacggtaagttgctcgtgtttaaccagcctgcctatgatattacgtttgtgcctcgggaggtgacgcagctggatacactcgacctttgcagtgccttgaacattacccgtgaacagtttgacaaacggatgaaggacgtcaagaaccgctggatgaaccccggttattccaaatacacccatcaggtgttcatgacgcagctttctgccgaagagtgcggtgtgtttcaggagaagctgttcaaatttccaggtttctatattcagcggcgtactatccgccaatatacctataactctgccggccatttgctgggggacatcggcgaagtgtccaagaaagacattgagaacgatgactattatattcgcggagactatataggcaagcaaggcatcgagaaatcctatgaaaagtatctgcgtggagagaagggggtggagattctgcttcgtgacgctcacgggcgcatccagggacactacatggacggacagttggaccgttcctccgtacccggcaagaacctgacgttgggcatcgacattgaccttcagatgttgggagaacgactgcttcaacacaaaatcggtgccattgtggccatcgaaccggctacgggtgagatactatgcatggtttcctcgcctacctttgaccctcatctgatgataggacgccagcggggaaagaaccaccgcctgctgcagatggacaagcggaagcctttgttgaaccgtgccatcatgggagcttatccgccgggctccaccttcaagacggcacaggcactgactttccttcaggaagagattatccacgaagattatccgactttcccttgtgcgcatggtttcaatcataaaggccttcatgtgggatgtcacggacatggttcgcctctgtcgctgattcctgccatcgctacctcttgtaattcctatttctgttggggattgtatcgcatgttcggtgataaaaaatacggttcgccgcagaatgccattaccgtatggaaagaccacatggtatcgcagggcttcggctatcggctcggtaccgacctccccggcgagcagcgtggcctcataccgaatgccaagttttacgacaagccctatcggggctcgtggaacggtctgacggttatcagtatcgctattgggcagggagagattcttgctacacccttgcagatagccaatctgggtgccaccattgccaaccgggggcatttcattactccgcacatcgtgaaggagatagaagacaatgaactggacagcatctatcgcaatccccgttatcccaccatcgaccgcgaatattatgaaatggtggtgaaaggtatgcgtgccgctgtagacggaggaagtacgggtagcgccacttgccgcatggcgggagccatcctgccgggtgtggaggtctgcggaaagacgggtacggcacagaaccgcggcaaggaccattctgtctttatgggctttgccccgatggacaaccctaagatagccattgccgtctatgtggagaacggtggtttcggtgccacgtatggcgtacctatcggtgccatgatgatggaccagtatctgcatggaaagctgtcgcccgagaatgagatacgggcggaagaattcagtaaccgggtgatactttacggagatgaggagagatgatgattaggggttagggatgaacggtgagtgacttcaatagtaaatagtaaatcgtaaaattgtaaataaattggtgacgaggagagatagcatatggaaatcattggactgggtgacgattgtcgtttacctgctgctgattgtattcggctggctcagtgtttgtggagcaagttatgattatggtgaccgtgactttctggacttctctacgcgtgccggcaagcagtttgtctggattatatgttccttcgggttggggtttgtgctgctgatgctggacgattccctctatgacatgttctcctaccttatatatatagggctgatgctgttgctgattgtcacgatattcattgcgcccgacacgaaagggtcgcggtcgtggctcatcctggggccggtcagtttgcagccggcggagtttgccaagtttgccacggcgctggcgcttgccaagtatatgagcgcctactcgtttacgatgaagaactggaaaagctcccttatgctggctttcctgattctcttccccatgttgctgattatcctgcagcgggagacgggttcggcattggtgtactctgcatttttcctgatgctttatcgggagggaatgccgggcgtggtactgttctcgggtatatgtgcagtggtttactttgtggtgggcatccgttttgatgcggtgatgattgccgatacgccgacgcctatcggagaatttgctgtgttgctgatggtactgctttttgccggaggaatggtatgggtttataaaaagcgttgggaacccacgcggaatattatcggcggttcgctgggagtgctgctcgtggcttatctgatttcggaatacgtggtacccttcaacttggtgtgggtgcagtgggggctttgtgcacttgttgtcgggtatcttatctttctttctttaagcgagcgccatttatcttattttctgattgggctgtttgctttgggttcgataggtttcctctactccagcgactacttcttcaataaagtgctggagccccatcaacagatacgtatcaaggtggtgctcggtatggaagaggaccttgctggtgccggctataacgtgaaccagtcgaagatagccatcggttccggggggctgaccggcaaaggtttcttgaacggtacgcagacaaagctgaagtatgtgccggagcaagatacggacttcattttttgcaccgtgggtgaggaggaaggattcgtagggtctacggctgtactgttactgttccttattcttattttacggctgattgccgtggccgagcggcagcaatctccctttggccgggtgtatggttactctgtgcttagtatattcttgttccatctattcatcaatataggcatggtgctgggactgacccccgtcatcggtatcccgttgcctttcttcagttacggaggttcttctctttggggattcacaatcctgctgtttattttcctgcggattgatgcgggacgtaatcgccgaatttagttatgaccgtttccttgtgggacatacgaatggacttgattatcattacattgcatttgcacattgttgacatcgtaatgtaaaggctgttacatcgcattgtaacgtcctttacgctgtattgtaacgacctttacactatattgtaacgccctttacatgctggtgtaacggccgatacattctggcgtaaaagacgtaacgctatgaggtaagagggcaagttatgataccccgcccgtttccgcttcaaggagacgtgagtgggagactgagatggttgttagaagaaggtgataaagaacaatagggagttcctatctcttcagtttgatgccgatgtcattgattccttgcagcctttcgtccggtagcgtataggccactttaaagaggtaggtgccgggtttgccgatttgaacgcttcctgcggagacggcagtctgatagagacctccccagccgtcacctttccagatcccttctttgtccgccaggattagctgtatggtgtctgcgggggaagggatggaatctgcggtggtgtagcagatggatagaggtagattctgataggggtagttgcttcggttacgaacttccagagacagtttgtagtaggtcagtgagtcggtgaccttcacgtcgaaagagagcgtgtcttcgcgcggccagccttcggtggggagggattggaaggaatggtatacggtctgtttgtcgcaagcgctcagcaggcttgcgacaaacagtagtatgatacctttcaggcagagattcctattcttgagccggtttgtcattttgggcaggtctttcaccttgaggtttgggcttattgttacggggcggacgacggttgttattgttccgttgttgacgttcgccttgttgctgttcaccttgtttgggtacttgccggtcttgtttctgtctcggttgccggtcttgcctggattgttctctctggttgttggattggggagcaccctgctcacctccttgcggacgaccgttcccactctttttctttctcttgttacggctgttgttgctgttctcgttaccgttgctgtcaccgccactcttgcctttccggctgcggtcaaagcgtgtgaggctctcttgttccagcaagtccaccggctttttgggttcggagcgatgggcttcttctatcaagctgtcgggcttgatgccacgtttgttcaaaccgataatctcgaaggcgcgtctgccgctgatggtcaccaggttggcagggatgttcttgtcgcttgagtaggttatctggttgctcagaatgtcggctttgaagaagaagaactcgccgtctttggtttccagggtaatctcgcgtgagggcaggcgtttctgtgcttccacgtagcagtccacttcgtagttgaggcagcacttcagcttggcgcattgtccggcaagtttctgcggattcagtgatatgtcctggaagcgtgcagcgctggtagataccgacacgaaggaggtcatccaggtggcgcagcagagttcgcgtccgcagggaccgatgccaccaatgcgtccggcttcctggcgggcgccaatctgtttcatctcgatgcgcacgcggaaggcgtcggcaaggaccttgatgagctggcggaagtccacacgctcgtcggcgatgtagtagaagatggctttgttgccgtctccctggtattccacgtcaccaatcttcatgttgaggttgaggtccagggcaatctggcgcgagcgtatcatggtggcgtgctcgcgggcttttgcttcgttgtacttctccatatctacgggcttcgccttgcggtagatgcgtttgatgtctgcctcggacttgatattggctttcttcatttgcagcggcacgaggcgtccggtcagggtcaccacgccgatgtcatgtccgggggtggcttctacggctacgatgtcgcctttctccaggggtatcttgttgctgttgcggaaatatcccttgcgggtattcttgaactgaacctctaccagctcgctctcatcggcattgcccggaatgtctgccagccagtcgtaggtgttcagttgcttgtcctgcctgccgcaactcttgcagcagagacctccgcttccgttatgtagtttaaattccatcatctgtttatttactatttgactatttactatttacgatttgatactttgcatttcattatcttgccacttttcattgtttcaataaaacaatcattttgagggagaagtcgaagaacaccatgcgggcgttcacgttctgctcgatgtggcgctgcgcttcactcagttcgtccatgatgcccacgacgttacgctcgttgacaaagggggcgaagcgggtggcgaagttctgttcgggcaacgtcatgtagttcatctccttgcggtgcaggttgtagatgaagttctcgcgggtcatacgctggcagtagtccaggaagttcttctgccgttcgcgtcccatggcggcaagctgctcgctccattgtttcatttcccgtatcttgcgctggtaggagagtcgcatcaggctgacaaagagattgaagaacagttcgttctcctcgttcagatggatggtctccaatgctttgataaagtctccgtttgccaggtgggctatggtctcgctgtcgcggggctgcactccgtacttctgctgtaaggctcctgctatgtcaacttcttcaatcttggggatgttgaagcgttgcgtgcggctgaggatggtgggcagtatcatttccggagcttcggaaatgaggaggaatatcgttttctcgggcggctcttccagcagcttcagcagcttgttggcgcagacttcgtgcattttttcgggcagccatacgatggtgactttgtaacctccttcgctggatttcagactgagcttgcgggttatctcgtcgctttctttggcataaatgatggcttgcccgttttcggcatccatctcgttcagccaatgattcagtccgaagtaggggctgttcagcagcaggtgccgccagttggtgatatagtcgtcgcagacttcctttttccctttggcactcttgacgatagggtatacgaagtgtacgtccgggtgcaccagcttgttccatttcacgcaggagggacaagtaccgcaggcatcggtttccgtccggttgggacagcagatgtagcgggcataggcaagtgccaatgggagttttcctactccggcagggccacagaagagttgtgcgtgggggatacgtccttcctgcacttcttgtatcagcctttgcttggctggctcttggcctattatgtccttgaaactgaacacggggtaatgagttataagttatgagttattacttgtgatactatcatttgtcaattatcaattgttcagtatatttgtttggctacttccttgatgctgtctgtagctcctaccgagtagaagtggaggcttgggacgccatgggctatcagctctttgcactgctgcacgcaccattcgatgcctacttgctgggcttctgcgtcggtgttgcacttcagaacctcttgggtcagttccttgggcaaatctactttgaacgtcttgggtatcatgctgagttgtgacagcttcttgaagggcttgatgcccgggataatcgggatggtgacaccggcttggcgggcgcgttccacgaagtcgaaatatttccggttgtcgtagaagagctgggtcacggcatactctgcacccatttccattttcttcttcagccagtagatgtctgtatccatgttgggggcttcttcatgcttttccggatagcaggctacgccgtacgaaaatggggtattggtaactttcatctcggagccgtccacaaagatgcctttattgaagttgttgatttgttcttgtagttcgacggcgtggtggtaaccgttgcctacggggataaacgaagattcgtgctttgccttgtcgccacgaagcaccagcaggtcggtgatgccgaggaattgcaggtcgagcagcacgtactccgtctcctcgcgggtgaagccgctgcaaaggatgtgcggcaccatggtgatgttgtacttgttctggatggcagcagctacggctacggtgccggggcggcggcgcaggcggtttcgctggaacaatccgttgccgaggtctttgtacacgtactcgctgcggtgcgtggtgatgttgatgtatttggggtcgaattcccgtaacgtatctatggtctgatacagcttttcgatgcccgtacctttcagtggtggcaatatttcaaaggaaaaagctgttttttcgttactgtttatcaggtcgattactctcatttctctttcgttatctttgtccgattggcaaaaatcttgcacattgggaacaaaaatacaaaaaagaaatgagaaatgtcgaaattgccggctattcttttatacagcggatggaaagagctttatagtagggcttgccggtgacatgggcggcgcttgagacaaactcgtcgctttcgccgagaaaataaatggtgctttccgaaagggtatgctttgtatgatcccaactccagaaggcggtcattttgtttggactgttgtgccccttgttgtaccacattcctacgggaaaagcattgaaccgggtatagttgttgacgggggctacttcaccggataccattgtctgccattctccggcttttagtatggagctgtcgttgccggtatagcttttcagctgttcccagtctgcatccgatggtattttccagccttcgggtaccagctctcctgccagtatggcttctccattgtaaaaataaatatcatacttatccggcttgtaatatccggctttgtctgttcccaaatcaatctgttttttcaagggagttccgtcacggtaggtggtggcatggagttctttacccatccagtattgggctccaatcttgacaatggggtattcggtagacactccttttctgatgtctcgaagggtgtagcatgccacattcaccttgatggcgttttccggcttttccagaagtagtttatggctgttgtctatatagagcttgtctatgccggtatattcccctttagtgtaggtaaatccatagtcgtctgtattccagcttattcttcctccgcagatggtgtctttacggtccgcaagctgtaggatgacgccattgctcaggtcggccttttcatttttacctatgggataggctataacggctctggaagtcaatgacgctgatttgagatattccttgcagacttctgcaatgggtatcccttcgtgataaattctgtacacatttgaaagagaaaaggagagagcggaaatatgtatggcagtgtaatcttccatattgtcggtgtcgatgggagggaggctgctccattccttgattttgccggcaaagctactcaggacgttgctgttgctctgcatggctgatatgttgatgatacattgcgtgctgctactcatttccacttcgggtattgcacaactgtatatacgtccgctccactccataatgaaggattgcttgccatcatttatcgtttggggtatgataatgaattccttgccggtaagtttgttgtctttgacactccattcaccggaggctatgatgtcttgtgtccccgtaagattactgaaagtcccgtcttccagattataatcggccgaggtcttgagcccggttgcgatgatacgcggattggctttcagcaaatcattggcagagttgcttgtgtcgggtgtcagagagattgccagtttggacagtttgtgttggaactccagggttacagatttggttttattggtgattccttgcgcttttgctaccaagaagtcactttgtgcgcggtttttctcattgctttggtctatctgtacagatacgggaagaacgggtgtaccggcaactaccccttcggtttggtaagggtggtaactgataaagtccagtggcacatctccttccggatagaatactgtcttttggggaatcagtgtagagccttccgtatattccagagccagattgtcaatataccgtttccccttgatagagccggaggaagtggttgcaaacaagcccattttgtctcctttttcaaaggcggtgtttgtgaccttggtactggccttttctattttgatagagaacgtgataggcgtcgtcccttcctcgatttccgcttctgattcttcgtcaatccggttcacacaagctgtattccctaaggacacgcagcagaataaagaggcagctaagactcctcttgcaagaataagttttttcattatattattattgcggggcaacggtttttccgctttcccagttatactcaatgaaccttgtcttaaaaatgtggatttagcagagctataaccggtatggaaaagtcttttacgcttttggatgctaattatcagtatcacgcttgatgccgcagtgctttttaaccttattttttaataacttttaataggtttcgggtacaaatgtaattaaacgtgttaaatgaagagggataaatcgataaaacttttataatttatttatcacactctgattttttgcctaactttacacgctaaaatagtagacagtaataagttaaaccatagatataaactcatgcctttaaatttacccgataaactacccgctatcgagttgctgaaagaggagaatatttttgtcatagataattcccgggcaacccagcaggatatccgtccgctgcgtatcgtgattctgaacttgatgccgctaaagattacaacggaaacggacttggtgcgtctgctttccaatactccgcttcaggtggaaatctcgttcatgaagataaaaagccatacttccaagaacactccgatagaacacatgaaaacattctatacggatttcgacaagatgcgcggtgaaaagtacgatggcatgattatcaccggtgctccggtagagcagatggattttgaggaggtgacttattgggatgagattattgaaatcttcgactgggcgcgtacgcatgtcacctctacgctctacatctgctgggcggcgcaggcagggctctatcatcattatggagtgccgaagtatgcactggataagaagatgttcggtatctttgaacatcgtaccttgcaaccgttgcatcccattttccgtggatttgatgatatattctatgtgccgcatagccgccacacggaagtgcgccgggaagatatacagaaggttccggaattgacgctgctttccgagtcggaggatgccggtgtatatatggcggtggcccgtggagggcgtgagttcttcgtgaccggccattcggaatactctccgttgacgctggacacagagtatcgccgtgacttgaataagggcctgcccatcgagataccccgtaactactatgtggacgatgacccggacaaaggagtgttggtgcgttggcgtgcccatgccaatctgttgttctccaattggctgaattattttgtatatcaggagacaccgtataatattaatgatatagagtgagtagcgtgtcacttgtcactcgtaattgaacaatgataaaacaacgtaaaatagagctgctggctcctgccaagaatttggagtgtggcatagaagctgtgaatcatggagcggatgcggtctacatcggtgcacccaagttcggtgcgcgtgctgctgctgtcaactctttggaggatattgccgctttggtggagcatgcccatctgtataatgcccgtatctatgtgacggtcaataccattctgaaagaagaagagctgaaagagacagagaggatgatttgggaattgtaccgtatcggtgtggatgcgctgattgtacaggacatggggattacgcggctgaatttgccgcccatcccgttgcatggcagtacacagatggataaccgtacgccggagaaagtacgtttccttgccgatgccggtttccgtcaggtggtgttggcacgcgaactttctttgcaggagatacgcggtatccatgaggcgtgtcccgacgtgccgctcgaagtctttgtacacggggctctttgcgtcagttatagcgggcagtgctatgtcagccaggcttgtttcggacggagtgccaaccggggggaatgtgcgcaattctgccgtttacccttcagtctggtagatgccgatggcaagaccattgtgcgtaataagcatttgctttctttgaaagacctcaaccaaagtgaggtgttggaagaactgctggatgccggagccacttccttgaagatagaaggccgcttgaaggatgtgacgtacgtgaagaatgtgacggcggcttaccgtaggcgactcgatgccatttttgcccgtcgcaaggaatatgcccgtgcctcttcgggcacttgccgtttcgattttcagccacagttggacaagagtttcagtcgtggtttcactcattacttcctgcaaggaaggggaggggagatcacttcgttcgatacgcccaaatctttgggagaggagatgggcactttgaaggaacagcgcgggggctatctcacggtggcaggcataaagcctttccacaacggagacggtgtctgcttcttggatgagcaaggacgtttgcaaggtttccgtatcaaccgggtggatggcaacaagctctatccggcaggggaagtgccccgtattaaaccacgtacccggctttatcgtaacttcgaccaggaatttgaacgtatccttacccgtaaatcctccgaacgcaaaatcggtgtttgttgggagttggcagataattctttcggatttagcctgacggctgcggacgaagatgataaccgcgtgacactttctttcccttatccgaaggagttggcacgtacaccgcaggcggataacctgcgcagccaactggctaagttgggaaatacacctttcgaggtagccgggcatttatcagaagaggcgtcgggtatcaggctcaatctttctgcgaattggttcattcctgcttctgtggtggcagactggcgccggcaggtgatagataagctgattgaggctcggcgtgttacttatcgtcgtgagctggctgtttggaaaccgaccagccatgctttcccagctacttcgctgacctatctgggcaatgtgatgaacagtgctgcccggagtttttaccgtgagcatggactctcgtctatagcgcctgcctatgaggcacaagcggttccagaggctgtgctcatgttctgcaaacattgcctgcgtttcagtatgggatggtgtcccacctatcagaaaggacattctccctatagggaaccttattatttggttgggacggacggcaagcgtttccgcttgtcgtttgattgtaagaattgccagatgaaagtcattgctcatgaagagccgctttaatgaaggacgaagaatgaggaattactaataaagacttgaaaatgaggagtgaggaacgggcacataatgaaaggctggcaaatgaccggtaccgggaagcgggcagggacaaacatcctttgcgttcactgcgttccctcctattctgcattctttattttttatgcttcattgctttagtttcctgtcattattcccgtcctaatcttgaagatgaacatctgtctaaggagacgcgtgattcgctgacctatctttttgaacggcattatacttggaataccaatctggaagtgctggcagattctgtgaatttggcttgtctgcccgtgaaggactgttataatatgctttatcggggagaccgcgtggtggttgccgagttcgccatccatcctgccgacagtgtggatagtgtatgggtgaagcttgcccattcgcaggaagtgcagggctggttgcgggagtccgaaatgatgcatgcctttgttcctacagacagcatttcgcaggccatctacttgttcagtgatacccatgcctcttattttatcattatttttgccttgtttgtgacagtctggctgttccgggcttttcggcgcaagcagctaaggatggtgtactttaatgatatagacagtctctatccgttgttgctatgtctgttgatggcgttctgtgccactatttacgaatctatacaagtgtttgcgccggagacgtggcaacacttctattttaatcctaccttgtcgccgttcaaggtaccgtttgtgctttctgcttttctgatgggattctggctgtttatcgtggtgttgctggcggtactcgacgatttgttccgccagttaagtccggcggcggccgtattctatctgttggggctggcctcctgctgcatcttctgttatttcttctttatccttactacatctatctacgtcggatacttgtttttggctgcttttgtatgggtattcctcaaaaggcttcgtatttcgctgctggcttcacgctatcgttgcggcagatgcgggcagaaattaagggagaagggagtctgcccgcattgcggagctatcaatgaataaggaaatcagaatctgcatcgtagttctatccctgcttgcacgggacgtcctttctgcataaatccgtttcccatactcttgaagtagaaggaggcgtaatccttgttgagggcattgcgcacccagaagtcaatttgtccatgtcctttctggaagctgatgcgtccgttcagcgtgccgtagaaggcttggctcacggtatttttctcggtccagtagatgcgcccggcaccggtgtagttagcattcagctggatgcggtccagccagtaccccggacggatgcggaagatgtactgaccgcccacgttcatggtatgcttgggaacaaaaggtacatacttgccattgtagctgatttcctgaagctcaccatttactttttcgttggtgatgtagtccttaaagatggcacgagtatagccataacttgcattcagcgtgaaatccgtagtaacggcagctgtcaaggcaatctctgccccttggctgcggcttttaccggcatttgccgtttcacgtcccagtccacttggggcgaaacgtgaaatctgttggtcgcgggtttccagccagaagatggaggcgtcggcatgcagacgtccgtcaaacagattcaggtgagttcctatttcgtagttccaggtttgttcgggtttatagacagtggcagattttgcatccggattctctcctgcatcggggaagtatttgctcaccaactctttgtaggcatccggtacgttggacataatcgcctctttgctttgccgcatcatgtcgtttttcaaactggattgcagcaagtcggagaacatctgcacgttgtagcctcccgaacggtaacctttgctgaccgtagcgtaaatgtttcctctgtttcgcgcaaagtcatactgcaaagcaaacttgggcaacagctgaagataatctttgtcgatacttccctggtagcgagactctacggtcagcgctgtctccggcatcatctctatttcgcggatgacgacatcgcctcgcttcatttctcccttgatgcccaccttgtactccaggctggtgccggagttgtaatccatgttcatacgttcataatccaaacgtagcccggcggtgaaggacactcctttcagcccgaataaatctctgaaggtggattgatgaaagagcgccccattcagcagcggagtgtcgaaactgcctccgatgggcatagcccggctgatgatgcccagtgagggcaggatattcatgctcatggacggacccatctctacttgtatttgtgatggaatgacactacccaacatctggttcagcatccccattccggcttctttgaaggttacgggagcttccgtattcagccattggtagaagccgaaggcaccggtggtccattgccagcggttgccgcttttactcttcaagatgatttcctcgctcagtgcgtgggagcattgtttctgttgcaaggtatagatgtcgttggcggtgaagtcttggtctatgtccatgcagtcctttagaaactggtagccggtgaccatgctcaacgtgaagtgctgtgcctggtattccaggttcagaccggtgttcagcaggttgcggtaatagttgcttcgggcattgttggagacctttccaatgtagggtttcatcgcctcgctctgtgcttcgggggccaggctaccttgatagaaatacgggtatcctctctggtcgctgtattcgtagttgatgttcaggtccaccttccagttgtccgaagggaggtaaatggcgcggatgcgtccgcctgccgattgccccttgtccgctttctcgtccctcaccgtgttgcggaagaatcctccttgataatcgtaaaaccctccggtggaaaaggcgaaccgttccgaaagccgatgatagtgggtcagcgaggtattataggcattgtgcgtacctgcccccatgcggaagtccgttccctggtaggagaagggagatttggtgtgtaccttaatcaatccgcccatagcattgcgcccgtagagcgtgccttgcggaccgcgtagcacgtcgatgcgctctacgtcggcatagctgaagtcgaaggctgacttgtctatataaggtatattgtctacataaagtcctacggagggagtgttgatgcgtgaacctatgccgcggatatagacagccgaagtcagtcgagatccgtagtcggggataaatatattgggcactacggatgtcagattcttgatggagtttacttgtgcgttctgcatgtcctgttgcgaaagcagggtgacggcagtgggctgctcgcgcagtttccggttttcttttggggtagcaatgacggttatttcctctacgtctaccactttcaaagtgtctgcctcttcggcaagtacattgccggttgccaaaaggcagaagatgccggctaaaattctatatctgttcataaactgtttttttgtacctgcaaagtaaggggattcttgcggaaggggcaatcctcatttattaggatttcgttcttggagtgctaatcttaaatcgttctatcatgtggaaaatatcgttccatcgtggagtaaaaatcgttccaccatggtggaacgatttttactccacgatggaacgattaaactttggcatacaagtacactgattagggcggcgcctttctgaaaaactccgcttctgatgtgttccggttgcaggattatattctgtcggcttccacatatccgtgcatgactgcatagatagtcagcccggatacggacttgatgcccagcttctcggtgatattcttgcggtgtgagatgatggtggtcaggctgatgttcagtttgtcggcaatctccttgttgatgaggcctttggtaatcagcaccagcacttctatttctcgggcggaaaggtcgtggctggtggtgtctggtgccatgtttgcgtgtccggcagactccggtctgccttggtgcaggtggtattggtctccgtattgacgcagctgcagaatgttctttgccaggttctgttcgtcctgatagatattcaacgtcggcacgctcgacaattggggaacggtttcaccgttgaccagcacaatggttttgggtttgcgctccagaaagaaagcggtatgctcgaagtaaatctgcgaggagatgaagtaatgcacatacatgtcaggcgtatcatccatcagctcaccaaaggaacggaaagagcggatgacggctgtcgggatgatttcctccagcaagttctgcagtcccaggcaggagagggtgttggagtcgacgattgctatttcaggagtcattctcgttttttgtttctgcaaaaatacggataattttttagggtttggctgtgtggggctgcaaaatgaaaaattctcctatgcagaactattctccctctcctttgggggagcggggagtgtctcctttcgcatattggctggggctgacattgaaatacttcttaaagacttcccggaagtatttcccatcgcagaaaccggttctttctgcgacttcggtaatagaatattttccctcttttagtaaattggcagcgtgtttcaaacgaatattccgtacgaaatctgccggggcctgggcggttagtgctttcagcttgttgtagaaactggtgcgactcatgttcaggagagaacataaggtgtctactgtgaaatcgggattatctatgttatcttcgatgttcttctttacattggacatgaatatccaatcaaggctattggaacaagtagctgtaggaggttcctcttctgctgcattgatttccaaatctgcatacttcttacgtagcaatgcacggttggcaagcagattggctatactggctttcagtatgtttatgctgaagggttttacaatatattcgtcagcaccgatctggagaccttcaagaatgtttttttcatctcccagtgccgtcagcagtagtatcgggatatgggaagtttcgatgtcgctcttgatggctgtacataattcgtctcctcgcatttccggcatcatgatgtcggaaagaatcagttctggccagaattgttttacaatagcaagcgcttctttgccgttaccgcatacttgcacgttgtaattgggggagaatgactggagcagatagtttcgtagctcgtcattgtcctctacaatcaagatacgttgcagtttgtccttgtcttcggtcaggaaagagtcggtacgttccgaaggagtaatgggaacgtccagttcataggcagacttcttctctttgattgccaatgtgaagtgcttgaactgttctttatctttgggcagggtgattctgatagtagtgccttgatgttcggtactttcaatgtgtattttgccattgtgcaggtttaccagtttccgtaccagcattaaaccgatgccactccccgtggtcttggagttaatggcgtttgtaccacggaagtgcatcttgaataatttcctttgttctttggctggaatccctatgccattgtctttgatctccagtctccacgtatttccaatgtcatatacggaaatgagtatgtcacctttttcaggagtatatttcaaggcattggatatgacgttcttcaggatggagtccattttctctttatcgaaccacacattcatgtaactgaagttactttcatatctgaaagaaatgtgctttatggcagcgtatgtacggaaaatattgtatatctcctttatataagtattcagttcatattctgctatgtacagatgggaggaatatacttctgcccgttcgaagtttatcagattggtggtcatgtgcaggagtgaattgacatttctcagtgccatgtgcatattgttggtctcggcttcgttcaatgtcttgttttcaagcatttcttccagaggtgcctttatcagtgtcaatggcgtgcggatatcatgtgcggtattgacaaagaagcgggttttctcatcggatatctttttttgttttctcagtgctatgatacgaaaaccggtaatgaacatcaatgccgccaataaaacatagcaagctatagcccaaaaactgaaccagacgggacgcgcaatgctgatgtcgatacttcgctcttcaaaatagagatacggctcttccttggataccgcccgtatgcaaagcttgtaatcgcccgaggcaagattggtgaagcggagatgcccttcttcactcagtcggttccagtcatcgtaaaatccttccaatttccagtagaaagtgacattgtccggtgcgtcataattaatggatgaaatgttgagagagaaagtgttctggttatatttcagctttaaccggtctgtctggttgatgttttccttcaagggggaattcatactgccgggaaagactgtctgatagaatatctgaaaatcgctgagtatcatgggggagtagatgtacttgggaagacgggttccttcggggaattcgatggctccgtctgtgctgccaaagacaaaacccttgttcttgcgtagcgttccggaagaggcgctgaagcaggaggacatcagcccttgctctttggtccagttgtggaatatcttctccgcagggtggaaacagctgatcccgttttcagtgctcatcaggatatgcccgtccgactcggggagtatggtgtagatgttgtttgaaatcaaggcacaattgtccttatgataatgcttgaacgtactgtcctttgcgttgtatacaaccactccggagccgtttgttcctatatatagagagaggtcttccgcttggtaaagtgtgttgatataggtcgcctcttcctgcaaggcgatatattggaatctgcctgactctctgtccaacagatatagtccggtacttgtcccaatccacatgtgtccgtcgtccttttctgtaatggcggtgatggaatttattccgggatacagacggacagaattcagggacaaatcgaagcacttcagattgtagaaccctccggaccagatatatcctttggagtcttttacaatgtcgcggatatacttgtcaggacgaatgttgtccggattgagcaggtaaggggagaaatattctaccgagagtgtccttttatttattttgtatactcccgaagtatatcctcctgcccaaataatgccgggtgatacctcgcatagcgtaatgaagatgtggttcttgtctttcagttgatggtcgaaagagctcaggaatgaatgccactgcccggtttttgattgataaaggctgattccgttgcttgttccgaaccataggtctccgtcactgtcttcaatgacagagtgcacctggtcgttgaccagcgattgtctgtttccgatggaatgctttatccagttgtagtttttgtaccggttgtctataatggtaatcccttccgggtagttggctatccatatccgcttttcttcatcaatataaatgtcattgatgttattgctgttcatctcattgtaacttttgtagttggaggtgatgtacggttccgagatgcacgagttcacattgattttgtgtatgcccataccttctgtcgctatcaatagttctgtccggttcagaggtctgattcgggcgatgtttacatcgctcaaatctgtattggagtgtataattcgttgttgccgtatgtcgtaggcaaagactcctttttcaaaagtaccgatgaaaagtctttgtgactcttggtggaaatagagtgcactgatttgggcccggattttgtcaagaggttcaagagggacaatctgcaatgttttgttttcgagtttgacgtatcgcgctcccttgctggtgcccatgaagaagtggttattgtctatttgttcgatacttgtaatgctcctttttaattcattgggcatttgatgggtttctccggtctttgtgtcatagagaatgatactgtatttgctacatagccaaattctattattgtgatccatatagctgcagctgatattgaccgatgctttgggcagtttatatatcctgttgaacgaatcgcgttcttggttatattgaaaaatgcatccggatttgcctattacccataatttcccttggtcttcaaaatatagccagccaagatggatgggggagtttgactttttatcttcttcaattaatttgtaatgtttgatgtcttttccattgtaccggtctatgccttcgttggtgaggaaccacatgtaacctattgaatccttttgaatgtcgaagattctgcggttacttaatccgttttccactccgatgtatttataggtttgcgctgtggcaatgaaaggtaagaaaaatagaaagcatacaatgtttctgatgaatctcatataaatatttctataaatacaataaaacaatgtatatgtgataattgtttacaaattaaacgataaaataaaaatttgaatgtaaatattatagcttaattaaagaatgcctttgccgcttccgcacatcgttcgccgtcaattccggcagaaacaatgccgccagcgtatccagcgccttctccgcaggggaatagtccttttacgcgtacatgttgtagtgtctccttatctcttgttatgcgtaccggagccgatgtacgggtttccactccaatcatgaccgcctcattcgtcaagaacccccggctgtatttcccgaataactgaaaacctttgctcaggcgttctgcaatgaaagaaggcatccagaagtggagaggcgaggagaccaatcccggtgcatacgaagtttccggcaggtcgtaacttagttttttcttagtgaagtctgccattctctgtgccggtgctgtctgcttcatattgccttgttgccagcagaggcgctccagatattcttgaaagtacatcatgcttaatggggaattgacggttggcaattgacaattagccgcgctgtcgtgctgcatagaaattgtaaattgtagattgtcaatagtaaattgctctatgtcttccgggcgtagctctaccaccattcccgaattgctccaacgggaaccgcggttgctgggactcatcccgttgactacaatctgctcgggaccgctggcggcgggcacaacaaaaccaccgggacacatgcagaagctatatactcctcgtccgtctacctggtttacaaagctatattcggcggcaggcagatattttccccgtccgttccggttgtgatattgtatttggtctattaaggtggcgggatgttccagtcgtacgcctaccgcaatgcctttagcttcaatctctacattgttggcggcaagccagcggtatacatcccgggcagagtgaccggtggcaagtatcaccgggccaaggaaagtcttgccggtatttgtttcaatgcctttgacttcatccttctctatgagcagggcgtccatgcgtgtttcaaagtggacttcgccaccgcactggatgatagtgttccgcatgttttcgatgacacgcggcagtttgtccgtacctatgtgcggatgtgcatctaccagaatggaagtggaggctccatgttggcagaagacgttcagaatcttgtctacattgccgcgcttcttgctgcgtgtgtacagcttgccatccgagtaagctccggcacctccctctccgaagctgtaattggactccgggttgacgagttgctggcggctgatttgcgccaagtctttcttgcgttcccgtacgtcctttccacgttccacaatgacggggcgtagaccgagttctatcaggcgcagagcggcgaagagtcctccgggaccggcgcctaccactactacttggggttttccttctacattattatataaggtatgttgatattcgtcctctttcggcatttcgtccagatatgcccgtacgttgaggttgatatagatggtccgttggcgggcatcgatactgcgcttcaagatgcgcgttgctgttatctcccgcgcattcagtcctttctcatgtattaagtactctttcaggcgttgctcgtttgccgctacttcgggcaatacgcgcagttggtattcttgtatcataatgattatccgaatagggcacggaatgcttcttccaccttccgtaccggtatcaattccattttaatcttcttcgtgttcagtccttgcatattatacttgggaagtatgaatcgcttgaatccaagtttctctgcttctccgatacgttgctctatgcggttcactgggcggatttcacctgacagacctatttctcccgccatgcacacctccggctctatggccgtgtccatgttgctggagaggatagaactgatgacggcaaggtctattgccgggtcgttcactttcaatccgccggcaatgttgagaaagacgtctttctgtgccagcttgaagcctacacgcttttccaatacggccagcagcatattcatgcggcggatgtcgaaccctgtggcagagcgttgcgggttaccatatacggcactgctgaccaatgcctgcgtttcgatgaggaacggtctgatgccttctatcgcggaggcgatggctatgccgctcataccttcatggtcctggttcagcagcagttcggatgggttgctcacctggcgcaatccatcttgccgcatttcgtaaatccccagttcggcagtacttccgaaacggttcttgatgctgcgcaggatacggtacatgtagtgttggtcgccctcgaactggagtacggtatccacgatatgttccagtaccttggggccggctatgcttccttccttattgatatgcccgatgaggatgaccgccgtatgcgtttccttggcaaagcgcaggatggaggcggaacattcccgtacctgggcgatgctcccaggcgacgattcaagggtttcggtagaaattgtctgtatggagtcgatgatgactatatccgggcgaatatttttgatgtggacgtaaatctgttccagggaagtttcgcacacgatgaggcagtcactggaggtgcttgtcaagcggtcggcacgcagtttcaattggcgggtgctttcttcgccggatacatagagaatacgtttttccggtatgcggagtacggtctgtagcaccagggtggatttcccaatacccggttcgccgccaattaaaacaagagaaccttgtacaagaccaccacccagtacccggttcagctcggcatcatggaggtcgatgcgcggttcgtcatcggctacaatctcatggagggttacgggtttggctttggcggtttctatgcccgatacgggacgcttgttcaccacttctttccgtaccacctcttccacatacgtgttccacattccgcacgacggacacttgcctacccatttgggagagtcttgtccgcagttgctgcatacataaaccgtcttttctttagccatagttgcgcattccttctaaaatgattgcccaaaggtacaatttttcaatgcagggcttgcagactcccatagagtttttttatttttgtgagtagaaaacaataacatgttataaaagccatgatagaagatattcttgcatacaacaagcgttttgttgccgagaagggatatgagaaatacatcacgaataaatacccggataagaagattgccatcctctcttgtatggatacccgtttgaccgctttactgccggcggccttaggtatcaagaacggtgatgtgaagatgataaaaaatgcgggtggaatcatttcacatccgttcggtagcgtcatccgtagtctgatggtggccatctatgagttgggagtgacggaagttatggttattgcccactccgattgtggtgcgtgccatatgagcagtgcccagatgatagagcatatgaagacccggggtatcaagcaggagacgattgatatgattcgtttctgcggagtggatttcgagtcctggctatatgggttcgaagatacggagaaatcggtaaaaggtacggtggaagccattgtcaaccatccgctgataccggatgatgtcaatgtcagcggtttcataatagattctgtgacgggagaattgaccccggtgcagtgatagttgtgcttcacacggtaatttcccctgccagcggtcgtcccatcagttcgcgtatttcggcaggtggataatcgtgccccagaaggaacatcagcttggttacggcagattccgttgtgctgtcatatccgcagacaactcctgcctgcatcaggtggtaaccggtttcatagcgctccatttcaacggtgccggcactgcattgggtgacgttgacaatgatgatgccttgttcgcaggcatcatgcaggcggcgtagaaaccattcctttcggggagcgttgccggaaccgtaggtttcgaggactacggccttcagtcctttagtggcaagtatggctgccacgacattttcctgaatacctggaaaaagcttcagtatggcgatgttggtatcgagcagataatgaggctccagttcgcggggagtgccgtgtgtatgaatctgcacattattatatttaatatgtataccggcagaagcgagtaccggataattgaaggagcggaaagcattgaagttctccgcgttcattttggtggtacggttgccgcgcatcaggtgattttcgaagaagatgcagacttcgggtacgatgggctgtccgttggagtggcggtcggtggctatttcgatgctggtcagcaggttttccttgccgtctgtgcggagcacgccaatgggcagttgcgagccggttaggatgacgggcttgttcagaccttcaagcatgaagctgagtgcggaagctgtgtaggccatggtgtctgtgccatgcagaatgacgaagccagtgtattggtcgtagttgtcgctgatgatacgtaccagtttgcgccaggcatcggggtccatgtccgaagaatccatgggcgggtcgaattgataagtgtcgatacggaacgcaaatctctgaagctcgggaacatgtttctgcaactgctcgaagttgaagctttccagggcgccggtttctgcattctctatcattccgatagttccaccggtgtatattagcaaaacggaagtgttttctgggttcatgcgcacttttctttcatgttttccatgcaaatataatgatatatattgagaatgatagcaaaatgttagaaaagaataaacggatatacagaaaaaaggtatggaaagtgtgaaagtgtaagccgtaagttgtgcatatttcttgcctttttaaaggctttctgtatttttatcgcaaaaaagtcgtaaaaagtgatagattgaatgtttttattgttacttttgcaacacttatcataaacgatagaaacaagagacaatgaacaagtactatcagcatacagtcacatccatgtggaccatgacccttaggggttagggatagtattttgtgtttctacgtgttacaccattttcaagcagtttttccatttaataaaagtcaatgcaagccgtatcagcttgtttccgacacattgtatcaaccatctcaacaatataaagagaaatgaaagtaatgaaattcggcggaacgtccgtaggttccgtgaacagtattttgagcgtcaagagaattgtagaagcagtcgatgaaccggttatcgtggtagtgtccgcattgggtggcatcacggacaagttgattaacacctccagaatggcggcagccggtgatgcttcttacgagaatgagttccgggagattgtctaccgtcatgtggaaatgattaaggaagtgattccggcaggcgaggagcaggttgccttgcaacgtcagattggcgaactgcttaatgagctgaaagatatttttcagggtatttatctgataaaggacctttcgcagaagacgtccgatacgattgtgagctatggcgaacggctttcatctatcatcgtggcacaactgacgggagctgaatggtttgattcgcgtaagtttatcaagacggagaagaaacattccaagcatgtgctggatacggagctgacaaattcgttggtgcgcgaaacattcagcagcctgcccaaacgcgtattggttccggggtttatctccacagacaaaatgacgggagaggtaacgaacctgggtagaggtggttccgactatacagcggcaatcattgctgccgcactggatgccgacagtctggaaatttggacggatgtagacgggttcatgacagctgacccgcgtgtgatttccagggcatacactatcaatgaattgagctatgtggaagctacggagctttgtaacttcggtgcgaaagtggtctatccgcctacaatctatccggtttgccacaagaatatccccattctggtgaagaataccttcaatccggagggtgtgggaactgtcatcaagcgagaggtttccgacccgcaaagcaaggccatcaagggtatttcatccatcaatgatacgagcctgattacagtgcaaggccttggtatggtaggtgttatcggtgtgaactaccgtatcttcaaggcgctggcaaagaatggcatcagtgtgttccttgtgtcccaggcttcttcggagaattcaacgtctatcggtgtgcgcaatgcggatgctgacctggcttgcgaggtgctgaacgaggagtttgccaaagagatagagatgggagagatttctcctattcaggcagaaaagaacttggctaccgtggccatcgtaggcgagaacatgaagcatacgccgggtattgccggaaagctgttcggtacgttggggcgtaacggtatcaatgtgattgcttgtgctcagggtgcttcggaaaccaacatctcgtttgtagtggacagcaaatcattgcgcaaatcgctgaatgtcatccatgattctttcttcttgtcggaatatcaggtactgaatctctttatctgtggcataggaaccgtaggcggtagcctgatagagcaaatccacagccagcgccagaagctgatgcaggagaacggcctgcagctgaatgtagtgggtattgccgatgcaaacaaagccatgttcagccgcgaaggtttcgatttgggacgtttccgtgaagaactgcaggagaagggaaaggacagctctctggaaacgctgcgtaatgagattatcggtatgaacatctttaactctgtctttgtggactgtacggcaagtgcaggcgtggcttccctttacaaggacttgctgctgcacaatgtttcggtagtggctgccaacaagattgccgcttcttccgaatacgagaactatcgtgaactgaaacagattgcccgccaacgcggtgtgaagtacttgtttgaaacaaatgtaggtgccggactccccatcatcaataccattaacgaccttattcatagcggtgataagatattgaagattgaagccgtgctgagcggtacgttgaactatatcttcaataaaatcagtgccgacattcctttcagcaagaccattaagatggcacaggaggaacgttactccgaacccgatccgcgtatcgacctcagcggaaaggatgttatccgcaaactggtgattctggcacgcgaggccggttactgtttggaacagagcgatgttgagaagaacctctttgtgcccgatgacttctttgaaggctccctggatgacttctggaagaaagtgccgagcctcgatgccgatttcgaggcccgtcgcaaggtgttggaagccgagaacaagcattggcgtttcgtagccaagctggaaaacggcaaagcatctgtcggcttgcaggaagtcggcgctaaccatccgttttacggtctggaaggcagcaataacatcatcctgctgaccacggcacgttataaggaatatccgatgatgatacaaggatacggagccggtgcgggtgtaacggctgcgggggtatttgcggatattatgagtattgcgaatgtttaaagcctctcccccccttctccctcccccgtagggagggggagcggatagattggcattcataaattatatagcagagaagaatatggaagtacaaaacaatagtaactcattccccctccctacgggggagggggttagggggagaggcttgaagcacatcatcatcctgggtgatggtatggccgactggcccgtgaaggctctgggaggcaaaaccttgctgcaggcggctgcaactccctatatggacaagctggcacgcatgggacgtgtgggaaggctggtgacggtggccgagggatttcatcccggcagtgaggtggcgaatatgtccgttctgggctataacctgccgaaggtgtacgaaggccgcggtccgttggaggcggcgagcatcggtgtggacttgcagccaggtgagatggcgatgcgctgcaatattatctgcatcgagggagacaatatcaagaatcattctgccgggcacatcactacagaggaagcggatgtgttggtgaaataccttcaagagcatctgggcgacgaccgcgtgcgtttccatacgggcgtgcaataccgccatctgctggtaataaaaggaggggacaagcgcattgactgtacgccgccccacgatgtccctttgaggcctttccgtccgttgatggtgaagccgatggaggggacggagaatatttcggtccccgaaggcggtgcagagcttactccgaagcagactgccgatttgattaacgatttgattatccgttcgcaagtgttgctggaaaaccatccggtcaacatgaagcggaagtccgagggtaaggaccctgccaatagcatctggccgtggagtcccggttatcgtccgcagatggagcgcctttcagacaagtttccgcaggtgaggcgcggcgccgtgatttctgccgtggatttgattaacggcatcggctactatgcggggctgcggcgtatcaccgtagaaggtgcgacggggctttatgataccaactatgagaataaggtggctgccgctctcgatgcattgcggacggatgattttgtctacctgcatatcgaagccagtgatgaggccggtcatgaaggaaacgtccccttgaagattatgacgattgagaatctggacagccgtgctgtaggtcctatctacgaggctgtgaaggattgggaggaacccgttgccatctccgtattgcccgaccatcccactccctgcgagctccgtacgcatacggccgaacctgttccattcctcatctggcatccgggtatcgaggctgacaaagtacggacatttgatgaagtggcagcctgtgaaggcagttacggactgatgaaagaagacgagtttatcaatgaattctttaatttttaatttaatatgaaatattatagcaccaacaaacaagcttccgaagtcactcttgaagaggccgtggtaaaggggcttgccgcagacaaggggcttttcatgccctttacaatcaaaactctgccacaagagttttacgatagcatcgatacactcagctttcaggagatagcctatcgcgtggcagatgctttctttggtgaggatgttcctgccgatacgctgaaacagattgtttatgacacactcagtttcgatgtccctctggtccgggtgacggagaatatttattcgcttgagctgttccatggtccgacacttgcctttaaggatgtaggcggtcgcttcatggcgcgtttgctggggtactttatcaagaaagagggcaagaagcaagtcaatgtgcttgtggctacttccggtgatacggggagtgccgttgccaatggtttcctcggtgtggaaggcatacacgtctatgtgctctacccgaagggaaaagtcagtgaaatccaggagaaacagttcactaccttagggcagaatatcacggccattgaggttgacggtacgttcgacgattgccaggctctggttaaatccgcttttatggacggggaactaaacgagcacctgcaactgaccagcgccaattccatcaacgtggcgcgtttcttgccgcaggcattctattacttttatgcctatgctcaactgaagcgtgccggtaagggagacaatgccgtcatttgtgtacccagtggtaacttcggcaatatcactgccggccttttcggcaagcgtatgggactacccgtggaacgctttatcgcttccaacaaccgcaatgatatcttcttccaatatttgcagacgggcatttatacaccgcgtcccagtatcgctaccattgctaacgcgatggatgtgggcgacccgagcaactttgctcgcatactcgacctttacggaggcagccatgccgccatctctgccgaaatcagcggtgccacttataccgatgagcagattgccgaaactatgcgggaagtgtggaagaaggaccattacctgctcgacccgcacggagcctgcggcttccgcgctttggtcgaaggactgaaactcggtgaaacgggcgtgttccttgaaacggctcatccggcgaagttcaaggatacagtcgagaagattatcggtgaagccgtagaaataccagccaagcttcaggcctttatgcgcggtgagaagaagagcctgccgatgtcgaaggatttcgcggacttcaagcaatatctgatgcatgtataaagaatgggacgtcagtaaagaaaaacaccggattgcttgacattgcctttcggatgttgtatctttgtaactgcaatcttagttcagattcaattttaaattagcataaaaggagaggcgtcgcttctccttttttgttgtgttcttccgtcacttcatttgctaaaccttagggtttactctcctgaaccagtgctttacagatttaatcctccacttcagcaagcggaatagcgggcatttgcttggaaaatcccagtggttttgacgaaaagctcggatgtttcggatgatatgttcagcgccgacagatggtgtgtcgaggataaacagatgatatgttcgggacggatacatggtttgttccggctatatgaacggacgataatgcgtctgttccgttaatcttccataaatctgctcttgacaagattggctgctttattctgtatcgggttcttcccggatgaggtctatcatgctgcccaacttatgatggttgttccatagcacaagcacttctatcttccggagactgtgccggtaaagaagcgtatagtcaggatgcgggatgatgtaccgtatgttctctgcttcggtgggctgtccgataaacggattcagcgtgatgcggtacaatgcattttggaataaggagtacagaaccccgccacaccgtttgttgccatctctttcttgcgaggaaatcagcaggcccttcagcgcctctttggcgaggggcgaccatattatttgtttagccatgccttcacctccttactgattgtgacgtcctcttgtccttctccctcatccagttgccggcaggctttcttaaggtcatggcgtagccgggtggagaatgcgaggacttgctttgtttgctgagacgattgttcttctttaacttttgccatagtgttatctcctttttctcctaaaacatttcaaagtaatgaattgtttgaggggaaaaatacgaagctgatgaaagataagaaactggaagccaatctcagtatggttgcatcgcgcgtcatggcggggttgaatatgaatggattgaaatttctgctccctttgtggctgggtgcattgacgggtgtcacggtgcgttgtgtctttgctgccgtggcattttggataacaggctggtttgtaaaggaggcaccggccacaaagcggcaacggatagggctgttctgtctgggagccttcggactctacggattcatgttttgctatctgctgggcatcagcaagacgactccggtttccagtgccatcttcaactctatgcaacctatttgggtctttctgatatccgtctttttcctgcatgaaaaggctacgctgatgaagattatcggtatagcgctgggttttggcggtgcgttgctgtgcatccttacgcaaggcagtgatgacctggcgcacgatgcgtttacgggcaacatgctctgcatggtgagctcgctggtctttgccgtttacctgattgtgagcaagaaactgctggaagaggtcggggtagtgacgatgatgaagtacatctttggcggtgcggcagtaacgggattgattgtgtcgtccattataggctgggatgcacccttgcttacggatgccttgcatgggaagtggcactgggtgccgtgggcggtgttggcgtttgtgctggttttccctacttacctcagttactttctggttccggtgggcttgaagtatctcaagacgacggttgtatccatgtacagctatctgatattggtggtgactaccgttgtttccctcaccttggggcaagaccgtttcagttggacgcaagccgctgccattgccatgatttgtatcagcgtgtactttgttgaagtggcggaagcgaagaagtagtgacgaataccaggtattccccttccgcctcgatggtgaattccgtactggtgcattcgttgagtgtgccttgccaccagttggtgaagtcgctgagaggatagaccagtcctttgccatgcagaccgtgtgcagtgaagttgatgatggatacttgctgtccgggatggcttgggaaggtgcgggtaccccggcaggggatgaagatgccgtaatcggtataggtacgtacatcggctccggcgcggagatagtcgatgagcaggctgatatttcccagggtatggtcttcacgcttgcccgtggcaccgatgatggcgatgcggcgtttgccttgcgccagcaggaagttgacggctttggtctggtcgttggtttcctggtcgctgatacggtgcaggatatgtccgaacttccggcggttttcatcactgagggagtcaccgtcgccgatgattacgtcgggagtatggccccggcggatgtattcgtccgctccgccgtcgcaacaaaccacgtaaggcgcttctgccaatatctttaaaggcaggggacttgtaggatattccccattcgccaaaactacggcatcaatagttaataattgctcgttgttcgttgatagttcgtttttcatatctttcttaatccctaatctctaatccttcgtctttgctcatcatctttctccatttgaagtagccaaagatagctataattgtataaagggcatatagtccggctgtaaaatcaagtcctttgtagatgtacagtccggcgctgacggcatctaccgcaatccatgcccaccattgttctacatatttccgtgccagcatccacatgccgacgatgctcagtgcggtggtgaaggagtccagccagggcacattgctgtccgtgaagtttatcaatatccaggcaatgccgaggaaggcggcggtgaatacggcagtaagcggcagcaagtagcgcgtcggcatataggtaatggaaagctcctgcttttgttcttctgttctgttgttctctcccctttgtggggcatctttccgtttcaagatagtacgtcgtagtacagctctgtacttccacatcatccagccgtagatggcagcacccagataatagatgttgatgccgaaatctgcatacaaccccgcatcatagtagacaaaaatatagacggcaggcataatgatgcccgctatccaaagataaatgcttgcccggtactccaaccagaggtagaggatcccggtcacagtgcctgtaatctcaagaatatgttccatcagaaattgattgctatatgtcccaatacattcgttcccgcctgggcagcgtagccggcatagttgtaacggacttttcctccgttatcgtcgagatagtatccgctgcctgcgtatccgttattctcgtattcttcattgaacagattatagatggtgcaccctatggttaccgactttactttaggcaacttgaaggtataggacagattcaggttgcttacgaaataagcatccagcgtgcactcctcttgcttggcgttactcatgtattgcttgctgatatattgtgactgtaacgaggcttcgaatcctttgaacgtatagccgaagcggttgttcagtatgaagtcgggagagaatgcgatgggggtatctccgtgttcgatgacccatgcttccgaccctgcctcttcgttttcaaaaagtgtctcggtaaagttctgcacacggttcttgctgagtgtggcattgatatcccattggaagccgcagtccagtttgatgccagccatcagttcaatacccgtacggtagctgtcgggcacgttgctggccatggcttcgcctatctcgttcagctctcccgtcagtaccagctggtctttatagtccatatagtagaagttggcacccgcatggagccatgagttggcgaaggtatatcccagttcgtagtcgaacaagcgctcagccttgggatgttcggtgaagtagccgtcggtgtagttgttgcgcgtaggctctttatgggctacgctgaacgaaccgtataggcggtggttgcggtcgatttgccaggacagtccggctttcgggttgaagaagtcgaagtcttcgtcgatgtccagcttctgcattcccggagtggtggcagtccagttgtacttgtcgttcagtccgtttatcttgtagtcgatgtggcggtattgcaggtcgaggtaggcgctgaggccgcttaccagttcataattggctttcagataaatattgccgtcattctttgtggcgttgttgcggtagtagtcgtggtcggggttcagttcgccgatatagttctttacccaaagcacttttccaaagtggtcgccgtcatagcgattcagtgcaccgcctagcgaggcatgcagacggtcggctttgtagcttacggagaagattccaccgccaaaccagttgtccattgccttcttgcggataaggtcgcttacttctaccttgccgccattgtattcgaaaggcgacatgccgtactctgtcaacgagcgttcgcctttatattcctggtagtacccgtcgcctttggtgtaatgcaggccgatattcagattccattgcgaggtgaaattgtggttgaacagcaactggtaattcttctgcgtatagttgtcggtctggtcgtcatagaaatgcagtgcacctccttcgtccgtgaggtaatgcttctcgccgttgtcgtctttataatattctttgctgtatacatggccgtcccggtcggtggcgtacatgaatccgcaggaattgtaacgccgtccgtaacgttccatctcctccttgctggcatagttccatgcgtggtaagtgcgctctttgccggcaaaggttatcagtttgacggaggtattgtcattgtagtatcctccttgcagataataggagttcagtcccacagatgcccggtctatatacccgtccgtactgatgttggagagccgcgcatcgaacgaccaatgattgttgatgagtcccgttcccactttcaccgtctccttgtgcgtatggaaggagccgtaggaaccgttgaattctgcatagggtttcatggagaaatcacccgtctgcatgttgatgctggcaccgaaagctcctgcaccgttcgttgaggtaccagctccgcgttgcacctgcatgtccttgacggaggaggcgaagtccggcaggttgacccagaataccgtgtgactctccgcgtcgttgatgggaataccgttggcggtgacgttgatgcgtgtgccgtctgttccgcggactctcagcgtggtgtaacccaccccggcaccggcatcgctggtagtaatggcggagggtgtcatactcaacagatacggcaggtcttgtccgaaattctgttttttcagttgttctttgcctatattggtgaatgccaccggtgtgctgtttgtggcacgtgtggagatgacttccacttcctgcaggtttatcacccgcaggctgtcttgttcttgtgcctgcgcacagacacccagtgctgccgtcaggaggcagaccgccattgcatgtctcttcatttgcaattgtttcgtttagatgaatacagaaaaggggaacttttcttcttttccctccgccggcattacccggatcaggttaatgggtatgatctcagcccgtcgtattagggcaccccttagttgaaatcggggcaaaggtaggagttttcgtcgaaagtggcaagttaagtgaacgaaactcagagttatttgttaattttgtagcattaattttaaaaaaagaatatagttatgttatcatctttattcatggcagcctttgctgcccaagttgctgacgatggtttcagcaaactgcagatattccttcagcaattgatagattggggcgtaagtgccggtggacgtattattggagctgtcatcatctttgtggtaggacggttcttgatttcctttcttaggaaaatgctggcgaggttattggcaaaaagacatgtggatgccagtatccagagctttgtgaaaagtttagtcaatatcttgctgaccattctgctgattattgccgttatcggcaaattgggagtggaaactacttcatttgcagctttgttggcatctgccggtgtggctatcggtatggcactttccggaaacttgcagaactttgcgggtggattgattgtactgttgttccgtcctttcaaggtaggcgactggattgaaagccagggagtgtccggaacggtacgtgagattcaaatcttccatacgattctgaccacagccgacaataaggtaatctatatacctaacggtgcgttgagcagtggtacagtgactaattacagccgtgaggatacgcgtcgtgtagattgggtgatcggtgtagaatatggtgagaactatgacaaggtagagagcaccgtgcgtcgtatcatctccgaagacagccgtatcttgaatactcccgagccgtttgtggctcttcatgccctggatgccagcagtgtgaatgtggtgattcgtgtttgggtgaagagcggagactactggggcgtttattttgatatgaacaagaagatttactccgtattcaacgaggaaggtatcgacttcccattcccgcagttgacggtgcatcaggcgaaagactgagtgggctacaagtttcaatttattagctatcagccactataagttacgggctacaagttgtcctgcattatcatactgcaggacaacttgtagcccgtaacttaatagtagtcggtaactccgtagtttatttataacttaattctgcctctatttcttcgcagacatcttgttccaggttgagcagctgattgatttcttttcgtttttccaaatccgtgaaatagctctccactactgcatagatgttgaagccggttgtggaacccgcagccaaatccaatgactcaaccattttctctactgcttgatgaatgcgtttcttactgataaaatgcagttcattactatgaattaagctcttttccatgatattttctgttttagttattgtagttataacattctatcaagcaagttagttcatgtagattgaacagacttgacagtcgaccgaacgatatttctttttatatttgccaaaaatataagcgcggcaatgaaagaactgtttataaaaatactccgttttctgatgtttgtactggtcgtagctttgggctgcatcggatataacatctatgaagatacgttggctgctgtgtggatacccgtaggggtaggacttgtggtggcagtcgttacacttcctctatataaaaaatggatatggctgacaacgatggagcaaaaggcagtgaatatattgtgtcatgtggtgtgcgtgggtgtcatcagttgttcgctttttctggtaggaaattatcagatggcggctcctgcttcgacaaaggaggtgacggtcaccgtacttgagaagctgataaaagaacatgaaaagagacgtaaagtaggcaagcatcgttatgtgtcggacggagtacgtaaggagtattacttaaaggtggctttcgaggatggagcgatagagaccttgcatgtttccacagccacatacaacaaagcacgaaaagacaaaccgaaagtcttgactttgcagaaaggagctttcggattgccggtgataacgaaggggttatagttctaattcccccatgcaagacatcagatgaggaacagaatgctcttcttaaagatttctgcgtacaaaatgtccgtcaatccaaatggtggcatggtgtcctttgaatttcagtaatacataattgggatctgtcgggcctttgctgaagtgtgcgctgaaccactcttgccacatttcctgcttggtggcttcgtcttctataatctccacctcaccggtgagcactacgctgtttcctttttcctgaaagcacaaacctgctttcggattggctgcaaactcctttgttttaagactgtctttgccggtcgccaaccatacggttgtggccccttccgacttgatgttgctcattggaacggggcggggatatccctcttggttgatggaagtgatgacgacggtttcgcatcttgccaagatttctgctgctttctcgattaatgttgccatattggatgtttttattgatttgattgctgcaaatataggcatggtaataggaagagctattgtaaaaaatcgacttttatgttttcacataactcaaagtcccttcttccaatggagcggaagtgagaagctggcttggcgcgttgccggacatctttttgatttcttttgagagatgggaaacatcataatatcctgctttgatggcaacggacagcagattgtcgaaagaggtacttcgcaacaagtctacagcatgtttgaacttcataatccgactgtactctttgggtgtaagtccggtgtgctgcttgaatttccgttcgaaatggcgttggcataggcaagtctcctccgctaaccggaggagtgacaagtcacccttgcatcgattgatttgctgtatggcgaacagcatgctccgttctgcttttggactgtatcggcataaggcttgaagcaggaagttttcaataaagaccaggtgctcttgaatggttcccagttcgcccagtctctctgcaaaagagtgggtaaagaggcttgtaagctcatcggcgtttaaccgtaagttggtgagctcctgcaaagggaggtccatgaagcgaagtattccgcaaggcagaaaacggattcccagcatatggattgttaccgtatgggtcaccaattcagaatatttggtcatggctccaatgaagtaggcatggtagggctgcataacgaggctgtcgtgtacggccttaggagcttcacccaacgtgaatataaagtcagtgcatccgtcaggcaggatattgatgtgcatgccgtatccgggttgtcctttaaactcccaatatttgtcaatatagggggagagcagggggctgggatgatattctttgtacataggttgtaaagataggaataaacttcgaagatagggaaatccctatgtataaatagagagaatcacggaaaaggaggtttttatcatactacatttgctgtatggataaatactaaaactttctattatgaaaaagatgtcagttgttttaggcttgttactcgctgtcttggtgacgggctgtggcatttatgagagctacgggtttgattataagcagttgagcagcattgaacgtggtatgagctttaaagaggtgtgtaccattttaggagagcctgcatttagagatttgaataaggagggagaggcttggacattccgtgcttatactcctgcggggtggtcggctgtcaaggtgtggttcaaagacggaaaagtggacgaaatgaagagctatctggaggatacttatccagttaccacttcgcgggacaagagtttcatggacgagaaaaaagaatcttccgacaagagtagcgaaacaaaggtaatagtttcgccggaagggaaacattacatcaaaatgggctcggtagtagtcactcccgaaggcaagcatataatagtaccttgattataccagcataatcgtttccggatatagtataatgtgaatatacctttctataaagtgctgatatttataaagttctatattttttgcagattttaggtatatgtagttcaaagaatgttatctgaaatgaaaagaatgggcaatgtttgtcattgctctgtctttatcttatatttgagtagataatataggatatcattttaagaaaggaactaataataagataataatatgaagaatattgagaaggcgaccaataatatgaaaatggtatattccattctgtgcaatcttaagaagtgtacaatctttgaattacagaaactgacgaagttcagggatgtggatttgtgtttggccttggggtatctgctgcagaataaccagatttatcagaagcgtattgataacatggtttactatggagtcgtcgcaaaatgaaaagatatacaataggtttaccacacattttgcttacatgcttgcatggcgctttctaattgtttgttataccgcgttttacggtatgtaagcagacgctatgcaagtatgtaggcaaactttgcttgcatgctgttttttcttgtgcaaatggctggtcttctttccgcaaagaacggctctttcttctactaaaagcttattaatgactattgtgcacggttgtgatgcagtttcttcactattgtggtacggcttcttcatgcttgtggagaagcagtaccacaatagtgcgcatatctaactgtcatttactcagtggactaaaaacctatatttgagtgatgaaaaactgataaatagtctttcattggctgtgtatgtaccttcaaaagagtgatatggcagtggataatgttcatgtcttacagtttttcagtgaaagaaatcatgaatattgggatacttgaaaaataagtttctcttttgcacgcgaattagaaaaccaaaagagttttgtaatcctcatcggaggggcgtaaaaataccggataagatgactgggtaaaaccaatcattttcattgtgcttctgttttgtgttctgaagtatcggtatgattataaactttccaaccaactcattacgtagcagatgcctttaaaagaaaaaagcaattatctatttcagataactgcttttctttggtgaaccgcttggggctcgaacccaagaccccaacattaaaagtgttgtgctctacctgctgagctagcgattcagaccttattgctgttaagcgggtgcaaagatagatacttttgtttaaaaaacaaatggattaagggaaaaagttttgataacgacttctgcttttactcttcttgttgattatcagtctgttcaaacttgtgaattttttctctgtttatgatgaaacgttgatagtaggagagcataagggtggtaagcggaagtgctataatcatacccagcatacccatcaatgagccccaaattgataaagacagtaggatgatggcagggttcaggcccgtaattttccccatgacacgcggtacgatgaatccgtcttgaatggcttgtactatgatgaataccgcaagggccgatgcaatgataatccagaagtttcctcccgtatccgctgctttcagtatggccagcacgatggtaggtataaagccaataatctgtaaatagggcactaggtttaaagcaccgatgaacaagccgagcccaatggccagtgggaaatcaataatcagaaagcctatactgaacagaataccgacacacaatgccacgaatgcttgtccgcggaagtatctgttcatgccgtctttcacatcgttcattacattgattacgaagggccggtatttctgtggtaccaggtggggccacccttcggaaatgctttcatagtccagcaatatgaagattatatagagaagaatgagaaagaaagtgaagaagctgaacagtagattgacggattctgacagcaaggaccagagccggggaacggtttccttgatggcgttcagcatattctcttccttgaacaattgggtgacaaactgggtgtctatgttctcacgaaggaattcagagagtgttttgggcacattgccgtcgtgggttccgttggaaaagtagtctattaccaaatctttcaccctgacgaattcgtccatcatgggaggcacaagcagataaaatgcggttcctcctacaatcagaatactgaataaggcgcagaagatggatatgacccggttcttgagccttaatctgtactggaaaaaggtgaccagggggtatatcagataggcaatgagccatgcgatgaagaatggcagcaatacgccgcttagacgcttgaagagcataaggatgccgataataatgacaccgagtatgacaccgcggataaaactgtcgaatgtaatctttttgcgttccataatgctctgttttttgtattcgttaatgaccgctttccttttggtcggcttggatggcttgctgatagcactcccggcatagaggttcgtactcttcggtttcccccagcagtacttgtttgtcgttcttgacggtacggtgggagaacgaggcgagttggccgcatttcacacagatggcatgtactttggaaacttcgtctgcaatggcacacagtcccggcataggaccgaatggaataccccggaagtccatgtccagtccggcaacaatgacgcgtataccattgttggcaagctggttgcatacatcaatcaggccgctatcaaagaactgggcttcgtcaatgcccactacatctatctctgaagtgaagagcagaatgctggcagacgagtcgatgggagtggaggctatggaatgactgtcatgcgatactacatcggcttcggaataacgggtgtctatggcgggcttgaatatctctacgcgttgtttggcaaattttgcccgtttcagtctccttatcagctcttcggttttgccggaaaacatagaaccgcaaatgacctcaattcttcccctgcgtttggtttcctgtatatgatcttctgagaataataccatgctttcgagtgttatatttaagcgcaaaagtaacacttttgtttgctttccgatattttttcattatttatttctacatttgtagcgttaacacggactgtgtaaaggatatgcaaaccttattaaatgacatagaattagatattcaggaattgaaatgtttgatgcaagccatttcaagtgataccaatccgacattgaggattgtggcaaaacggaatatccagcagatgaaggtacgcttggaggcgttgcaagaactgcttgaggaggcgccaacggctgttgtgccgcccctgaaggacatccctactgctactactcctttggctggaccggtttctccggttgtaccggtcgtccctgatacaatgaagatggtatgtgaggaaccggaaacagttcatacggctgaagcgctccagactgttgtaacttcggcatctcctattttggcagaacgtatcaagcctgccaaggatttgagacatgccatcagtctgaacgattcattccgttttgtccgcgagctgttcgcaggcgatgctgcacggatgaatgaagtggtacgacgtttgggtgaggccccttctttggacaaggctatggatattttcgtttcggaagtgcagccggatgaagagaatgaagccgctgtcgattttatggaactcctcaaaaaatatttcagctaaacaaccgataagtatgggaaaactttatgtagtgcctaccccggtagggaatttggaagatatgacattccgtgctatccggattctgaaagaagtggatttaatattggctgaggatacacgtacttccggcatattgctgaaacacttcgaaataaagaatgtgatgcaatctcaccataaatttaatgaacataaaacggttgaaagtgttgttaatagaataaaggggggagaaactgtagctttgatttcggatgcaggtacaccgggtatatccgacccgggctttctggtggtcagagagtgtgtgcgcaacggcatcgaagtgcaatgcctgccgggagcgacagcttttgtgccggcattagtggcttccggattgccgaatgagaagttctgttttgaaggttttcttccacagaagaaaggaaggatgactcgcctgaaggcattggccggggagcgtcgtaccatggtgttctatgagtctccccacagattggtaaaagctttggcgcagtttaccgaacatttcggtgccggacgtcaggcatctgtttcgcgggaaatttcaaaggtgcacgaagaaacggtgcgtggaacgcttacagaattaatagaacatttcacggcgaacgaaccgcgcggtgaaattgtgattgtagtagcaggaatagacgattaaataacttcattaaccaaacgtaaaacgaaagcgtatgaaaaagttagcagttttaattgtatgcgcggctgtaatggcttcgtgtgacagtttctctggtggcagtaagaaccagctgaaagctgaaaatgattctttattgatggaactgactcagcgtaatgctgaattagacgagatgatgggtactttcaatgatatttcagagggattccgccagattaatgcggcggagagccgtgtggatttgcaacgtggcgctgtggcagaaggctctttgaatgccaagcagcagattgcgtcggacattgaatttatccgtaaacagatggaagagaacaaggagcagattgccaaactgcaatctatgttgaagaacagcaaaaacaactctgttcagttgaagagagctgtagaatctttgactcaggagttggtggcaaagacccagcgtattgaagaattgcaggctgagctggcttccaagaatatccgtatccaggaactggatgctgccgtgaccggcttgtctagtgagaaggaggaattgactgccgaaaatgaggcgaaggccaaaaccgttgccgagcaagataaggcacttaacacagcttggtttgtgtttggcacaaagaaggagctgaaagaccagaagatattgacaaataccgggcttttcaaaaaaggccaggtgctgaaagattctgatatcaacaaggactactttacacaagtggatatccgtacgacaaaagagattaaactatactccaaagatgctgatatcttgaccactcatcctgctggctcttatgcgttggagaaagatgataaaggacagctgactttgaagattacaaatccgaaagacttctggagtgtgtccaagtatttggtaatccaagtaaaataacactgttataagattgatacagaacggacgcaggttattggaattgataatctgcgtctatttttatatatacctttcctttaagtaatggcatctcaatataaaaacctcttttttgatctggacgatacgctttgtgcattttcccttaatgcacgtgatacattcgaagaaatgtatcacaagtatgactatggtcgtttctttcgctctttcctgcatttctatactctttatcagcatcgtaatacagagctgtgggaagaatacggtagagggcaggtcagtaaggaagagttgaaccgccagcgtttcctatatcctctggaggcagtaggggcgagggatgttgctttggctgaggctttttctgatgatttcttttcggtcattcccacaaaaaatcggctgatgccgcatgcttatgaggtgctggaatatttggcggggaaatataacctctatatcctttccaatggtttccaagaactgcaatgtcataagatgcgttcggcgggtatcgaccgcttttttaagaagattgttctctctgatgacatcggtgtcttgaagccctggcccgaaatctttcattttgcactttctgccacacaatccgaagtgcgtgattctttgatgataggcgatagttgggagaatgatgtggcaggagccaaaggagtgggcatgcaccaagtgttttataatgtaacagggaaggaagaactgcctttccaaccgacttatcatatcagtaatctgaaagaattgatgcagattttgtgacattgaaatttttagttgtacttttgtctgcagaaacgtatattatacagctatggacacaatcttacctttcgctttactttgttttacctccttctttacgttgacaaaccctctcggcaccatgccggtgtttttgaccatgacgcatggaatgacagaccgtgaacggcagtcggtagtatcgcgcgccactttggttgcctttattacgattatggtttttacgtttgcgggacagttcctctttaagttcttcggtatctctaccaatggtttccgtattgccggtggagttattatctttaagattggcttcgatatgctgcaagcccgttataccccaatgaagctgaaagacgaggaaatcaagacttatgccgatgatatttccattactcctcttggaattccgatgctttgtggtcctggtgccatagccaatgccattgtgctgatgcaggatgcccacaccattcagatgaaaggagttcttataggaatgattgcctttatttatctgattacctttttcatattgcgtgcttccacgcggttggtcaaaattttgggtgagacgggaaacaatgtgatgatgcgcctaatgggacttatcctgatggttattgccgttgagtgttttgtcagcggagtgaaacctatattggtggatatattgaaagaaggaggcataccatcactggcacacctcctctaaacactttatttataaaaacacattgggaaaattcccaagtttctttaggctactattgattaatagcctggattttgttctatgttcggattggcattgatttcaccgacgggaatcaacgggagcgctttcttggagtcgcggttgaatgtacgcgcttcttcgctcaatacgtcgtgccatcctctgtcattaacgtccgtgtagcgtgtaacggtttcacctcggcgcataacatcgaagtagcgctgtccttcacctacaagttccttgcggcgttcgatgtagatgcggtctaatgtgatgtttccgctggttacttgtttgctttcatccgttgtgcggttggagatgatatcgttcagcaagttggcagccttgttcttgtctccggcttggaaagctgcttctgctgctgacaagtaaacttctgacaagcgcagcaatgggacattggagtaacgtacatctccgtttacagcaggcattttgttgatgtaaactttacgtttgtcaaatcctcctgctgccgctgccaataatatgtcgttacggatgtctgccgggtcggatgtaagcatgtcagagaagtcttttgtgacaattacatctccatatccgggagaagcgccagccttgtctgcatataagtaggcaataccttcacggtctgtccagtcagtattgttgttgatggaaatctcgaacatgatttcttttgaatgattggcatcacttttgctccatgcagcaacatattctgacggttcccaaagtttgtaagacgagtttgatatgatgtcttcagctacggataaagccttgctccattcgccttttgtcatatatacacgtacctgcaaggctttggcagcccaaaggttgacataacccacttcattggttttgggcagtgcatttgagttgattgcatctgtcaaatccttttcaatagcctcataacattgggctaccgtgctgcggcttggcttttctgtcgattccagcggggaggtagcgatgggcacaccgagtgagctgccttgatctaccgtataaggtttaccgtagatacgtgtaaggtcaaacagtgccatggcacgcagaacttttgcttctgcatcatattggtcaatagtggcttttgcctctgccgcgtcggtcaggttgccactttctgctgcctgaatcagacggttggcgcgtgctatgactacataaggcatctgccatacggctgttgaggtggtgaaattgtcggcagttgtatattccatatagtagtagaagtttgctcttccacttccaccgttatattcatattggatatcttcccctctcatgtcaccgtatacgaacatgaggcgtccataataattaattaggctactgttacctttaacggcagcataaagtcccgtccgcacattggccaaatcatcgctgttcttgattgcggtttcagcatctattccgtctgcgggtgactgatccagccaactgttgaggcatgatgaagtgctgactgccatagctgcgcaaagcgttgctgtgtataatgtctttaatattttcattttcgtatctttattagttagaaattcaattctattccgaatgtatatgttctcaatgccggagtctcaaatgtgcatagtccgtctacacgcatttccggatctacaaataagtctttagacttccatgtaagcaggttggaaccagagaagtagattctggctttgctgagcccaagcttgctgatatagttttgcggaatgcttacacctaatgtgaggttcttcagacgtagataatcagtaggcatcagccagcgtgaagacagtgaagctacgcttccatattcaaatttaggcaatgtggcattcgtgtcgcccgggccggtccacatctttgagatgtcgtagtatgtcggtacggcaccatcgtatagatgtgaaccgccattggagtgctgccaagtggagtagtcaaaagcatcaccacccaatgaataagtgaaagtgaagcccaagtcaataaacttccatttgaggttgttggtaagaccgccttctatactagcctgatgcttgcctacaatagttttgttggcttcagagatattggttgttgtcttgcgggcattctctgttccgtcattcaggtagaacatttctttaccggtctcagcgtcgactccggcgtattcataaacatagtatgaatagtaaggttcgcctacacggtgaatcagtggtcctgatacgatttcattctgctggccatccagtttggtcagtttgttgctgttatgtgccatgttcagagaagtggtccatgtgaaatccttgtttctgaaattggttgatgtaatggtcaactcaaaaccggagttcttcagtgaaccgatgttctgcggagtggtatatccgtaatcgccatcataatatcctccgacttgtgatacggggaggtcgtatataaggtcactggttttacgctgatagtagtcgaatgttacggagatacggtcaatgaatgaaaagtcgagaccgatattccatgttttgttcttttcccatttcaggtccgggtttgcaattccgacgattgacattcctgactgtccattgtatatgactccatatttataaagattcatataagcgtaatagtctgatggttgcgttccgtttacaccatatgacacacggagctttccatctgtcaatacactcttgacgggattcagaaaactttcgtctatgaatctccatgctccggaaaccgaccagaaacttccccaacggttttctcttgccagacgtgaacttccgtcggtacgatagctgagaccgagataatatctgtctgcgtagttataattggcacgtccgaggaacgaagtcatgcgatagctctgtctgttggtttcggcacttgttgaaccggcatttgtcaattcgtacaaatcacccggatagtcttggcctgccatatagttgaaagcatattccgtatcttgtgtttcaaaaccaagcagggcatcaatattgtgcaggccgaaagagttgatgtaagagagctgggtttgtgtattcagctggtcattacgattgacaatgcgctgcatgacaccacctggagcgccattgtttgagtgtctgtcccaaagaacatcattggtaccttgtgcgtaatcataagcaatcttttcacttaaatttaacttgtcccaaatattataggtcaacttgattgtattaaatgccttcatcagggtataaacgtcagagctgtgctctctttcatacaaaggattgactccaaatatgccgcaaccattgtttaatgtgccgtcttcattatagggagttgatgaggggctttggaagaatgcataattggctacaggcccatcataggaggtagcttcattggttttgttttgtcttacttttgaaaattggcttgtaacctgaacttcaaagtctccaaacttatgagtgaggtttgcattaccagtgaaacgttccagaccttgtttgtaaatgatgccttcctgattggtataagcggctgaggtgtagaatttggtacggtcgttgccgccagatacgctcagctggtagttctgatgagaaccgttacggaaaagctggtctttccaatccgtccatccggttgagggttttgaagcgaagtcctcgatgttctggtctgcaaaagttgcggcatctgcatcggacatgtttccgctgtataatccataattcttgagaccggtccataagagttcgcggcgtgagtcaccgtcgagcataggacgataatctattgccatgtttgaaaaaccccagtcagagcggaaacttacatttgttttaccttgttttccgcttttcgtcgtaatgaccacaacaccgttagcagcacgcgagccgtaaagagaggcagccgccgcatctttgataactgtgatagactcgatgtcattggtattgagtgaagacagaatatcagttcctgcatcactataagtgaactcggataagtctccacttgttaccggtgttccgtcaataacataaagcggattgtttccggcattgatggaacccataccacgtacacgaatactgcttacagaacctggattacttgaacttgaaccaaaagtaacaccagcgacattaccagaaagcttgtcggcaacagaaagaacaggtacatcttccaaggtggaagtgtttacagtagaagcagctccggtaaatgatgcttttttaaatgtaccgtaaccggtaaccacaacctcttcaagcagctcagaatcggatttcaaaattacctttacatgaggtttaatcgttacttcttgggtttgcataccaacaaacgaaatcaccagagttttcgcggaactataataattgtatattgttgaaaaacaactgtttatgtttgccgtagaacagggtttattctattgtatattatctataaaggtatatggcaaagggaggtaagtatctcaaagtacccatttcataccgttttgaataattaaaagctgataatgagcacgttattgtaacatttcattctactcttttaattggtgatgtactaattaacccaataaatgttttttattcaagaataacgatagattatatagaggaatatattttgaaagatagattttatccatgaaagttccaaaatattttttgttgagaaatatttggtttacatatgttatttataatcgatgaatatataatatgtatggaaagattcaattataattgaatgattttatatctttgtgcataaactaaatcgtgtttgaatatgaaaaattatatctcccgccctttatacataaggagaattgaaccgtttattgataaaagtataataaaagtaataaccggccaacgtaggataggtaaaagctacattcttttgcagatatcagatatcataaagaaaaacataccggaagccaatatcatttttgtagataaagagcaacttgccttcacggaaattaggaactacatggatctttatcaatatgttttaaagaaggttattgggcataatcataactatctctttgtagatgaaatccaagagattgaagaattccaattgtgtctgcggagtttattgaatgaaaatagatgcgatatctattgcaccggaagtaatgctaaaatgctatccagtgaacttgctactcagttggcaggaagatatatagaatttcccattcattcacttagctacggggaattcttaactttcaatcaatgtcaagattccaccgaaagtttaaaactctatcttacattcggaggtatgccctacattcataatctaacaatggacaagaatgtcatatttgagtatttgagaaacgtttattccactatcctactaaaagatgtggttgcacgtgaatcaatccggaatgtatcttttttggaaaatctcgtagcttatctgatagataataccggttctcttttttctgcccagaatattagtaaatatttaaagtcgcaacacgtcaacattcctacgcagacaattctgaactatctaaaggcactgtgcaatagtttctttatttacaaaattcaacgagctgaaatccaagggatgaaaatctttgagattggtgagaaatattattttgaagatttgggattacataattccatacagcatttcgattttcgaaaagacatcaacaagttaatggaaaatgtagtatgcattgatttgttaagatatggatatgaagtatatgttggaaagagtggtaataaggaaattgatttcattgcttccaaagacgaccataaaatctatattcaagtagcatatatgcttcccgatgatgcaactgttaggcgagaatttggcaatcttttggaaatagcagacaattaccccaaatatgtggtaacaatggatgaaatgcaaagcgggggaaattacaaaggaattaaacagatttcactgcgaaactttttgttggcagaggataaggaaaaactgtaaattaacgattcaatctctgcgaatcgatatttaaagtaaaaagccggccccttgtgtgaaccggcttttcttatgtaatttttttaattttcaaattactctgtctccaaagagttaaggtatgcttccgca

SEQ ID NO: 155 - DNA, 8329 bp, Bacteroides uniformis; identical to SEQ ID NO: 5
  source 1..8329: mol_type = genomic DNA

SEQ ID NO: 156 - DNA, 5731 bp, Bacteroides uniformis
  source 1..5731: mol_type = genomic DNA
gtgtttttccgaaagtacgaatcgtgaattttaggctctaacaaccctaaaattctgtaaccttgtcttaggttattatcttgtattaaccttgtacgaaaaaaaacagattcataagttcttatatatcatcatgttaaataggcataaaaacatgatatagcaacaaatagtacgtcatacagcaacaaatagtacgtcaaaaaaaattagatatagcaacaaatagtacgtatatagcaattaaatcaatgcattaattgctatatctattttttatattatatttgcaaccgaaacaaacaatcgaaagtatggcaagaccagtaaaagcacaatcaaaagacataagacagagcaattatttcacaactgcaaagtatgattacactctgcaagagaaaatcatactctatcgtgtagcagaacaagcatttgaatacagagaagccaacaaagaatggttcgaacagcacgaaggagaatacatagctagagaccatgtttcctttagattgccgattacacacttcatgacaaaagaacaaaaagctgatggaggcggaaagtgttatgatgatgttgtggcagctttcaagtcattaacaagcaagcgaatagagtttcagacaaaagatgcattctcatttggtgcgttgctaaattctgccgacagagaaccaggtgaggggataatatattttactgtacataaatttgtatggcaatcagctttggacttcaccaaagggtttacaaaattcgatttggttgtggctatggaattgaaatcagcctactcaatgcgtttctttgagattgctaaaagatggagtgataccaaaatatggaacatttccgtagagaattttaaagaaatgtttggctgcaaggcaaaatacccaagattagagtctctcaaaagatgcgtaattgataatgctaaagaagaactggatagggttgctccttggtcattttcttacgaacagcacaaagtaggcagaaaggttgatagctttactttctacttctatgaaataccaaagaacaagagagaagaagcaacacacaaagaactgctttcgaagtacccgcaagctgccatcaggccagagactaaggattggctcaaaaacaagatggggttcaacatggggcaaatcagaagcaatgtaaagttaatcgacgagctgcaacgcatcttccaaaacgacacaatccaagaactggaagaaacattccaatacatagcgaaacagggattcagaccacaggagaatataggatggttcattcagaatctgaaaaaaaagatagaaaatgcacagtcttgattgttttgcataatcaaaattataatccaatataaaactattacgaaaatgacaaaagcagacttagtacaagagatttcaaaacagaccggaatagaccggaacgaagttttaatgatagtggaagcattcatggaaacagtgaaaggttccctgtcaaacggaaagaatgtatatctccgaggattcggtagtttcatcatcaaacgtaaagctgaaaaaacaggacgaaatatcggacagaacacaactctggttatccctgctcataatgtcccggctttcaagccatctaaagagttttcaaaaaagctatgttaaagtcctatcgcaaagaacaacgtaaacaattattttctaattttatggcagttaactaaaatcaaatggcttatgaaaaacattttgctaatcagttctttctgtatgctttgtataggctttagttcttgttcaaatgaaaacgatgaatttgtacaagacaataaagaaatgaatacgaggtctgttaaagctatacatacctttcctaatgtctcaagaattaaaacagaccctgatgtcgtaaaaaagatgaatgaagcatgggaagaaatgaaaaactatgctgctaaagggaaaagaagagaatatggcttttatatctattatgatgaatcctcagataaaattcattgtggaaagatgcaaatgggagacaatatacccaactgcgaaggcactcatgcatctatagaactaaagcctgattatcctgctcttgaatttcaaaatacagtttgcgctcatttccattgtcatacaacattgcaatactgtccatcttatgtatcaagagaaacagggccttcaataggtgatattaattttgccaatagtcagcagttgcctggtattttatacgattatgaagatgcaaaaatatatggcggtgatagcaaagataaaaaatataaaatgcagacgtttggtgaatatgcccaacgtcctgatagaatctattaaaaaaggaggtttgtttatgagagcattatatcttttaatttgtacaatgttttgtataaatgcaatggcacaacaagctaatttcgaagctttaaacagcagtgaaaaagaaaaacacttaatatcattatcaaacgatattatcaaacttttaggtccgggatactatagagaagtcactcctactattacagaagaaaagtttgaaagtagtgataaacgatcagaaatcagccgaaatattggacgcacatattatgaagtaacatatggttatgataatagcaaagaatcattagattttccattttcagcaaaagtaagcatttggaaagatactggtgagccatttgaggttatctttggaaacggttatggacgaaatttctttttcattacatatgatgaagtcttaaaacgaaaagtcataatggaacctgtaccatatcagcaaatcaaaagtcaaaaaacaaagattatcaatgagacacccataaaatagcaaaaatcatctttgtacatcgggccacttctcaaaagttttaggattatcatccgcaaaccgtcgatagactttctcacgtctccagattgaatcacattcagtttggagacgttcttctttttattttcggggaaattgtttatcttcgccgctgaggtaacctgcttacaggttgatagcgcactatcaactttgaacgccttcggctaaagttggtgcgctctccgagggggcaaggggcaagccccctgccgaccccatgccgcccccaacccaatccgtacgaccatggcgaagacatccatccacatcaaggcctgcgacaccgcaggatccgagctgcacaacaagcgcgagcggcagctctcctacatccgtcaggacctgacgcatctcaacgaatcatacagctataccgggcaaagcctggccgcagagctgaagcgcatccagcaggacgtgaagaagcacaccggacgaaagctccagaagaacgccatcccgctcaaggaaggggtggcggtcatcagcgacaccaccaccctgtcagacctgaaggagttctgcacccggtgccaaaaggagttcgggctggtgccgctgcagatccacgtccaccgggacgagggacacacggcagccagacaatggaagcccaacctccatgcccacatcgtctggagaatgtacaacgagcaaggccggaatgtcaggctctccaacgtggactgcgcccggatgcagaccatcctggccgaatgcctgggcatggaacgggggcaggcgagcagccggaagcatgtcgatgcactccagtacaagatagaggccaaaacctcacaaatcgaacaactgacggaggaagtggcggaactcagcacgaccaaagcagccaaagaagccacgatagacaccttcaagaccgtaggtgcgcacgtcgtcgatgcaatcacgggcaagaccaagcggaaagaagagggtttaaagggtgaaatcttacgtttaaaggacgaactggccaaaaaggaagcagagataaccaggataaagaaagaggctcaggaagccttaaattcggtcagaagccgatacgaaagcaaagtgtacggcctccagcaggataagcaacgggcggaacggtgggagaaagcggctgaagccaatgccgaacgctggagaaacaggttcttttccctctggccggatgcagcagctgccatcgaggcgattgtcaagcggtgcaccacaatgatacgtaccttcacaaccgcacacatcgcctccatcgagaaggccttgcgcaatgcccggtcgatggatgagcggaaaaaatacgccagtgacctctggaacatggccaaagacgagatgccgggcaccactccaaaggcatggatacaggagggaaagaaagacctggacctgctggtcgagtacggcccggaacagtaccaaaagcaggaacgcagccggacgcagaaccgggggatgcacctgtaacggcacaatacagtttctgaagatttcggcagctcgactgccgaaaggcgttttgtggctacaaaaccacaccttgcatgtggtttttcatcgcaaggcagaggggttactatcaaacaagttaaccagcaaaccaagcaacaagtcaacaaaccaactttatcactacggaacaaagagaagtctcacttgctgttttgtgtgtccagcaagtgagacttccgtatcaaaatatatggttcactttcggaaaaacaaagaagccgtttggggacatagacggcttcttcttaaatgaatcaagccaattccaaaacatccaacagcttgatgttgagtttttgctccagttctgcgatacttttaaaagaaaaattgactttcccggataaaatcttactaatatactgtggagatactcctaaacgctctgccagtccgtttctgtttaaaccattggattccatatactccactaaagacaaggcgatgttacgtgaccattccaaccaagcctcgttttcctttctccatttcgcattttcctcaaaatgagagggagaaatactttcatgtttttttaaaaagtcaatagctctactcatattcaatcctccttgtttaaatcaacgaaactatctttgtcaaaaactccattagccttaagaaaagctttgcatctattcagtttgtccaattccatagctgtatgctccttatcctgcatcaaatgtgtgagctttatagccccacccgtaaccacataaacattggcttcaagacggatggcatatatccgtaaccagcttgcgtgcttatccctgttccaattacgagcttttcttcttgtcaattccacacatcttgcatctgtgacatcaagaggcataaacaaaccgtccagattttcagtataaggaaactccaagataagttcttccagctcatccgcatcctcaaatgtgtctcgtatggcttccgaaactttttctatatggaaatacttccttaggtcttcgatgttgtctttgaaaaaatccaatagataatccgcattgttccatttttcaaacaatgaagtaagctcatcaaactccttgtccggctcctttacagcccacaaatggtcataacctccaataactcttacaaacttcataaatactactcttttcatgggcaaagataccaaaggaaaccaatataaacctataagtttagttatttaacaatcaatgctatttaaaagcgcaataagcgcccatttaaatgccacatatttacatatcagaacgtattaacacatattttaacacgcagaaaaaatgtcccatccatttttaacctcaaacctttccttcctttctttttctccatggctttt

SEQ ID NO: 157 - DNA, 4981 bp, Bacteroides uniformis
  source 1..4981: mol_type = genomic DNA
ttacaaagaaacgctttgattatttgtgcaagcggattaaggaacttgacccatacgccacaatctaaaaaaaacagcacttatggcaagagctatcaaagaaaacaagcaagtgttccagtcttacgtactgactgctgcaaagtatgatttcacagcttatgagaagcgaatcatgtatcgccttatagaaatggcacaaaaggaaatcgaaggcattaaattcaaagacaaccttcgtaaaataacacctgtatatcttggagtagaagttgtgatgcctgtttctgacattctgcgtgacgaaaaagatgaaaactatagcatagcaaagaatgccttcaaacggcttgcagacaaacatatcgaatacgaagacgatgaaatatggcaatacacgcctatcattacagacccaaaaatcacaaaaagaaatggtttggtgagattctatgtagttcatgatatttggaagtgcatccttaattttactaagggctatcggaagtacgagtttgtaacagccatgcggtttaagagtgtctattcgatgcggttctacgaactcatggcagggcagacaaagcctctgtttgttccgttagaaggtcttgacggactccgtgagaggtttggactgcaagggaaatatgaaagagtgaacgatttcaaaagatatgtcctcgatgtggcaaaagccgaacttgatgaatattccccctattcattcgtagccaaggaagagaaggacgggagaaaggttattggttggactctgtttcctgttttctttgaagacagagaagaccctgcactacaggaacaggcgcgcatggctaaagttacggcacggctccagctggaggacaacgtatatgactacctcaaattctcctttgacttcaagtctgatgaagtcaacaagaacaagaaaacccttatcgaggggcaaaaccgcatccccaatttcatggggttcctaggagaattgaaaaaaggcgcacgactggcagaaaaccccaaaggatatgttatcggggctatcaaaagaaaattaaaagaaatctaactgaaagagaacaacataacaaatagtttcttaagtttgccatatctaaactttaaatgtgtactatatgaaaaagtttttattatcattagctactgctttttcctttgtgttattcttagggtcatgtaccaatgaagaggacataaacaacaacggttattccgataaagaaaaagctaaaatcgaaacattgatgaatttgttcgattcttatggttgggaacttgacacgactgttagtatagaacagcgtaacaaagaacttttagaaatggattacgaaaagactaaaagtttcttagagtacatgagtaatggtattgagtttgataattttgaaccaactcaacaaagtgaagacaatgcaccaaaagccttaagcgacacaagatctactatgaccttccctatatatggtagtcatagtagtgctgtcgcttcatcgcaaaccactatgattttatcttatgacggtccaaaaccttcaagtgtaacgatacaaagtacatcagtatcttcaaaccctgcaacaacttggactcctgacgaatacggttcttttaacttttcagggaaaaatgtgataatataaaagccacaggaatgattaaatatggcagtatctataaacacaaatacgaaatggtagggtggtgttcaaaaaatagttcaggtattgttgatgacgggaaaataactggttttcatgcaatataaccaaacgattaaaaacattataaacaaaaaagcggagaatactactctccgcttttttgtttatccatctcttgaaaatactcataatacctcttgtagttatccctgtccttgactgcatccacccacagataacacatcagacaggcgaacaatagggagaaaacagcacaaaggattgaatacatggaaacgttcttgtccacatagctgccatttttcattctgtttccctgccgttcaaagtccgccaatacgttttttaggcgattttcagcactttcaaggcttcccctgtctatttctacctttttggttgttgcgtcctctatgcgcttcgtataggcttctacacgcttcaattcttgaaacacaagttctaccgcaagctgcggatttactttgggcgtggtgtcctttctctttcgagggctgtactgtccctgcttataggtgtaatcctccgtctttgagtttgagggtgtttccataattcctgctgattgagttatacttcaattttttctgtgtcttctcgatgtgggcaagcgtatagcctttccctatctcgcttgccttgtattccgttccgctccgggctttcacgtagtagccgttgagttttcctgtacttgcccgggcttcccttaccttgaagcccagttttccgagttcccggctgaatccggcaaggtcaaacccctgcatccgtataagaacatcatccatagcctgttttatctcttccctgttggttttgcctatgtcctttgactgtaccaaattccgttctctggctatactgttggcagcttccgtggctctcttccctatccagttgtcttggtatagttctcccgataacgacacacggtttgccagtatatgcaggtgggcttgcctgcggttcttctccgttccgctgtgcttcacaatgatgtactggtggttcatcaaacccatgcgctgcatgaagtcattaccgagcttcgcccagtccgcatcggtcatgcctgcactttcttccactgaagggctgacctcaaaccgaaggcagttgttctttacgttcggaaaatcaacaaagtaaggtttcatctcctgcaccatatcttcgcctgtgcagccgaaaagctcatggcggtgtatctcggtggctgctgcctctccgtttatctctttggcaaggtcgtactccaatgctgccgtgccatgagatatgctctttccttttgctatcatcgtgaaagtatctttttaagttcattgattagtgcctggttctcctcgaacacttccctgtactggcgcccaccgaagtagttgttcagacgctggagtgttcctttcagtcgggctatctcccgaaacagttccctttcttcttccgtgtacctctccttgggtcgtccgcccagtgcgagtgtacggcagtattccgatgtgctgatgccgcatcgggctgcctgttccgcaagtgccgccttttcaagtgcggtgcagcggaatgttatcttctccgttcgattcacttccatgtcgcaaaggtaatcttaaaatccttttgagcaaagcgagaaaggcaagaaatgtccgacaaggacacttcttgctatatacacatgctgcatgggaatacacacagcgttaacacactgtatagccacacactttttttcttttttccctgccattcccacaacggaacacggagagcggtcaagggttcgagcggaaaaaaccgcacagcgaagctgctcaggattttttcagatccgaacttgcgaagcccttgacggcttcggagtgtggagttacctttgcagactgaaaagagaaaaaaacacagttcgcttcactaacgctgactggtcaaaggataccctgttcagatatgatttttttaagaatagatacacttacggtagagaagtctgacttatcatagacatccacaagataaacacgaccttcactctccgatgcacaaatcgtgtatgtgataacgcgtgctccaccagacttaccctttcccttagagacaatggcaagtcttattttacggatacctgggcttagttcatccccctgcatggggttcttttccaatgactcgacaaaatccttcatgtcagccttaaaagacttatacctttttgcaaggattttcgcttccctctcaaaatgcggggtggtctttacttcaaagctcatcaagaaatgcgtttgcgctcttggctggctgctcaccagcttcgattcgtttcacttcattcaagccctctcttattcgagtggctattttttcttctacggacactggcaccagtttaaaatcaccgatacgtgaagtcagaaagacggattccccctgaatagcacgaagaagggtcgctgtctgattcgtccgaaatttgctcaatggaattacttgcatatatcttaaactttttgattgtgatacaaatgtaaccattattaccaatattgtaaccaaattaatatactttaacgcgcgggaaaaagcttcaataaccgcacaatcccccatccccccttacaagggggctttgtctttgttttccctattgtttttcatccgttttttccgaaagttcgtaagcatctgcaaccttatgagcctgtttctatcttaacatcgactatctatgtcctatcctcgcgcgcgcgcattatgcgagaaaaacaccctctaagtacgagaaatttaatgtttaaagacgagaaatttaatgttgttttgagcctcaaatacgagaaatttaatgttgtttgcgagaaacaattatattaactcgttttttatttatatctttgctgcgaaccataaaagcacacttatgaaaccaactacttacattgattgggatggtctgaaagacattccgttcttctactgcgacacaaaggaagatgaggaaaacaaagactttgacatctactacatgggtaagctggtgctgcatgactacaaccattgcggacactacctctacacagctgctgtactgtttagcagaatcaagaacaaaacggcagactgggtgaacctgcgcaatctttggattctgcgtgattgcgtgcgtgagaactacaatcacggcataggggtggacgacattatctttggagagaattttgatggcaagaacttcgatacactcacaccac

SEQ ID NO: 158 - DNA, 4785 bp, Bacteroides uniformis; identical to SEQ ID NO: 6
  source 1..4785: mol_type = genomic DNA
